(19) United States
(12) Patent Application Publication
(10) Pub. No.: US 2024/0189410 A1
(43) Pub. Date: Jun. 13, 2024

(54) IMMUNOGENIC COMPOSITIONS AND METHODS FOR ELICITING AN IMMUNE RESPONSE AGAINST CLOSTRIDIOIDES (CLOSTRIDIUM) DIFFICILE

(71) Applicant: Pfizer Inc., New York, NY (US)

(72) Inventors: Annaliesa Sybil Anderson, Upper Saddle River, NJ (US); Marina A. Gonzalez-Garis, Bloomfield, NJ (US); Lei Hu, New City, NY (US); Isis Kanevsky, New York, NY (US); Paul Arthur Liberator, Lewes, DE (US); Justin Keith Moran, West Nyack, NY (US); Lynn Marie Phelan, Lake Hiawatha, NJ (US); Michael William Pride, Staten Island, NY (US); Shuai Shi, Whippany, NJ (US); Naveen Surendran, Dumont, NJ (US)

(21) Appl. No.: 18/535,116

(22) Filed: Dec. 11, 2023

Related U.S. Application Data
(60) Provisional application No. 63/598,556, filed on Nov. 14, 2023.
(60) Provisional application No. 63/485,995, filed on Feb. 20, 2023.
(60) Provisional application No. 63/387,100, filed on Dec. 13, 2022.

(51) Int. Cl. A61K 39/08; A61K 39/39; A61P 31/04

(52) U.S. Cl. CPC A61K 39/08; A61K 39/39; A61P 31/04; A61K 2039/55561

(57) ABSTRACT

The present invention relates to immunogenic compositions that comprise a Clostridioides difficile toxoid A and/or a C. difficile toxoid B, and an adjuvant, and methods of use thereof. The present invention further relate to a methods for eliciting an enhanced immune response in a human against a C. difficile infection. The methods include administering to the human an effective dose of an immunogenic composition, which includes a C. difficile toxoid and an adjuvant, wherein the composition is administered two times.

### REFERENCE TO SEQUENCE LISTING

[0001] The instant application contains a sequence listing which has been submitted electronically in .xml format and is hereby incorporated by reference in its entirety. The .xml file, named “PC072922A Sequence Listing.xml”, was created on Nov. 29, 2023, and is 2,360 KB in size.

### FIELD

[0002] The present invention is directed to compositions and methods concerning Clostridioides difficile toxoids and methods thereof.

### BACKGROUND

[0003] Clostridioides difficile (C. difficile), formerly Clostridium difficile, is a Gram-positive anaerobic bacterium that is associated with gastrointestinal disease in humans. Colonization of C. difficile usually occurs in the colon if the natural gut flora is diminished by treatment with antibiotics. An infection can lead to antibiotic-associated diarrhea and sometimes pseudomembranous colitis through the secretion of the glucosylating toxins, toxin A and toxin B (approximately 308 and 270 kDa, respectively), which are the primary virulence factors of C. difficile.

[0004] In the last decade, the numbers and severity of C. difficile outbreaks in hospitals, nursing homes, and other long-term care facilities increased dramatically. Key factors in this escalation include emergence of hypervirulent pathogenic strains, increased use of antibiotics, improved detection methods, and increased exposure to airborne spores in health care facilities.

[0005] The increasing burden of C. difficile infection (CDI) on patients and on the healthcare system demonstrates that prevention of CDI constitutes a significant unmet medical need. To date, there is no approved vaccine to prevent primary or recurrent CDI, and treatment options are non-optimal. Thus, there is a need for efficacious C. difficile vaccines for the prevention of CDI.

### SUMMARY OF THE INVENTION

[0006] The present invention provides for immunogenic compositions comprising a Clostridioides difficile (C. difficile) toxoid A and/or toxoid B, and an adjuvant. In one aspect, the adjuvant is a CpG adjuvant. In another aspect, the adjuvant is a saponin containing liposomal adjuvant. In one aspect the C. difficile toxoid A comprises the amino acid sequence of SEQ ID NO: 4, wherein the initial methionine is absent. For example, the mutant C. difficile toxin A comprises the amino acid sequence set forth in SEQ ID NO: 84. In one aspect, the C. difficile toxoid B comprises the amino acid sequence of SEQ ID NO: 6, wherein the initial methionine is absent. For example, the mutant C. difficile toxin B comprises the amino acid sequence set forth in SEQ ID NO: 86.

[0007] In one aspect, the CpG adjuvant comprises at least on CpG. In one aspect, the immunogenic composition comprises about 0.1 to about 1.0 mg/mL of the CpG. In one aspect, the immunogenic composition comprises 0.5, 1.0 or 3.6 mg/mL of the CpG. In a preferred aspect, the immunogenic composition comprises 3.6 mg/mL of the CpG. In another aspect, the CpG adjuvant further comprises aluminum hydroxide (Al(OH)₃). In one aspect, the immunogenic composition comprises CpG and aluminum hydroxide at about 0.1 to 5 mg/mL or higher. In one aspect, the immunogenic composition comprises CpG and aluminum hydroxide at about 1.0 or 1.5 mg/mL. In a preferred aspect, the immunogenic composition comprises 1.0 mg/mL CpG combined with 1.5 mg/mL aluminum hydroxide. In a preferred aspect, the CpG is CpG 24555.

[0008] In one aspect, the CpG adjuvant comprises a histidine or phosphate buffer. In one aspect, the CpG adjuvant comprises sodium chloride.

[0009] In another aspect, the adjuvant comprises a saponin containing liposomal adjuvant. In one aspect, the saponin containing liposomal adjuvant comprises a saponin and a monophosphoryl lipid A (MPLA)-containing liposome composition, wherein the liposome composition comprises i) a lipid bilayer comprising phospholipids and ii) cholesterol. In one aspect, the saponin is QS-21. In one aspect, the phospholipids are DMPC and DMPG. In preferred aspect, the saponin containing liposomal adjuvant comprises QS-21, Monophosphoryl Lipid A (MPLA), DMPC, DMPG and cholesterol. In a preferred aspect, the MPLA is Monophosphoryl 3-Deacyl Lipid A.

[0010] In one aspect, the immunogenic composition comprises about 0.05 to about 1.0 mg/mL or higher of QS-21. In a preferred aspect, the immunogenic composition comprises 0.2 mg/mL of QS-21. In one aspect, the immunogenic composition comprises about 0.1 to about 1.0 mg/mL or higher of MPLA. In a preferred aspect, the immunogenic composition comprises 0.4 mg/mL of MPLA. In one aspect, the immunogenic composition comprises about 0.5 to about 20 mg/mL or higher of cholesterol. In a preferred aspect, the immunogenic composition comprises 11 mg/mL of cholesterol. In one aspect, the immunogenic composition comprises about 0.5 to about 20 mg/mL or higher of DMPC. In a preferred aspect, the immunogenic composition comprises 14 mg/mL of DMPC. In one aspect, the immunogenic composition comprises about 0.5 to about 3.0 mg/mL or higher of DMPG. In a preferred aspect, the immunogenic composition comprises 1.6 mg/mL of DMPG.

[0011] In a preferred aspect, the saponin containing liposomal adjuvant comprises about 0.2 mg/mL QS-21, about 0.4 mg/mL Monophosphoryl 3-Deacyl Lipid A, about 14 mg/mL DMPC, about 1.6 mg/mL DMPG and about 11 mg/mL cholesterol (LiNA-2).

[0012] In one aspect, the saponin containing liposomal adjuvant comprises a histidine or phosphate buffer. In one aspect, the saponin containing liposomal adjuvant comprises sodium chloride.

[0013] In one aspect, the immunogenic compositions comprise the C. difficile toxoid A and the C. difficile toxoid B in a ratio of about 3:1 to about 1:1. In one aspect, the immunogenic compositions comprise 50-200 μg of toxoid. In one aspect, the immunogenic compositions further comprise at least one of a buffer, a stabilizer, and a surfactant. In one aspect, the immunogenic composition is lyophilized. In one aspect, the lyophilized immunogenic composition is reconstituted prior to administration with the CpG adjuvant or saponin containing liposomal adjuvant.

[0014] The present invention further provides for methods of eliciting an immune response in a human subject against Clostridioides difficile, the method comprising administering to a human subject a first dose and a second dose of an immunogenic composition described herein comprising a C. difficile toxoid A and/or C. difficile toxoid B, and a CpG adjuvant or saponin containing liposomal adjuvant.

[0015] The present invention further provides for methods of preventing, treating or ameliorating a medically attended C. difficile infection in a human subject, the method comprising administering to a human subject a first dose and a second dose of an immunogenic composition described herein comprising a C. difficile toxoid A and/or C. difficile toxoid B, and a CpG adjuvant or saponin containing liposomal adjuvant.

[0016] In one aspect, the method comprises administering an immunogenic composition having a C. difficile toxoid A comprising the amino acid sequence of SEQ ID NO: 4, wherein the initial methionine is absent, and/or a C. difficile toxoid B having the amino acid sequence of SEQ ID NO: 6, wherein the initial methionine is absent. For example, the mutant C. difficile toxin A comprises the amino acid sequence set forth in SEQ ID NO: 84 and/or, the mutant C. difficile toxin B comprises the amino acid sequence set forth in SEQ ID NO: 86.

[0017] In one aspect, the second dose is administered about 2 months after the first dose (M 0, 2). In another aspect, the second dose is administered about 6 months after the first dose (M 0, 6).

[0018] In one aspect, the method comprises administering an immunogenic composition comprising a CpG adjuvant. In one aspect, the CpG adjuvant is at a dose of 0.5, 1.0 or 3.6 mg/mL. In a preferred aspect, the CpG adjuvant at a dose of 3.6 mg/mL. In another aspect, the method comprises administering an immunogenic composition comprising a CpG adjuvant combined with aluminum hydroxide (Al(OH)₃). In one aspect, the aluminum hydroxide is at a dose of 1.0 or 1.5 mg/mL. In a preferred aspect, the adjuvant comprises CpG at a dose of 1.0 mg/mL combined with 1.5 mg/mL aluminum hydroxide.

[0019] In a preferred aspect, the method comprises administering an immunogenic composition comprising CpG 24555. In another preferred aspect, the method comprises administering an immunogenic composition comprising CpG 24555 and aluminum hydroxide. In another preferred aspect, the method comprises administering an immunogenic composition comprising LiNA-2.

[0020] In a preferred aspect, the composition is administered at a dose volume of 0.5 mL.

[0021] In one aspect, the immune response elicited comprises neutralizing antibodies against C. difficile toxin A and/or neutralizing antibodies against C. difficile toxin B.

[0022] In a preferred aspect, the neutralizing antibodies elicited against C. difficile toxin A and/or B is greater after administration of 2 doses of the immunogenic composition compared to administration of 3 doses of the immunogenic composition.

### BRIEF DESCRIPTION OF THE DRAWINGS

[0023] FIG. 1 shows the neutralization titers of individual animals (NHPs) immunized with C. difficile toxoid antigens formulated with LiNA-2 adjuvant (2 doses and 3 doses) compared to formulations with aluminum hydroxide (Al(OH)₃) (3 doses). Formulation of toxoid antigens with LiNA-2 elicits a robust and more rapid immune response able to neutralize TcdB cytotoxicity after 2 doses compared to 3 doses formulated with Al(OH)₃.

[0024] FIG. 2 shows the neutralization titers of individual animals (NHPs) immunized with C. difficile toxoid antigens formulated with LiNA-2 adjuvant (2 doses—M 0, 2) or CpG adjuvant combined with Al(OH)₃ (2 doses—M 0, 2) compared to formulations with Al(OH)₃ (3 doses). Formulation of toxoid antigens with either LiNA-2 or CpG/Al(OH)₃ elicits robust and more rapid immune responses able to neutralize TcdB cytotoxicity after 2 doses (Month 0, 2) compared to 3 doses (Month 0, 1, 6) formulated with Al(OH)₃.

[0025] FIG. 3 shows the neutralization titers of individual animals (NHPs) immunized with C. difficile toxoid antigens formulated with LiNA-2 adjuvant (2 doses—M 0, 6) or CpG adjuvant combined with Al(OH)₃ (2 doses—M 0, 6) compared to formulations with Al(OH)₃ (3 doses). Formulation of toxoid antigens with either LiNA-2 or CpG/Al(OH)₃ elicits robust and rapid immune responses able to neutralize TcdB cytotoxicity after 2 doses (Month 0, 6) compared to 3 doses (Month 0, 1, 6) formulated with Al(OH)₃.

[0026] FIG. 4 shows the neutralization titers of individual animals (NHPs) immunized with C. difficile toxoid antigens with two levels of CpG adjuvant (0.5 or 1.0 mg/mL CpG) combined with Al(OH)₃ (2 doses—M 0, 6) compared to formulations with Al(OH)₃ (3 doses). Formulation of toxoid antigens with CpG/Al(OH)₃ elicits robust and rapid immune responses able to neutralize TcdB cytotoxicity after 2 doses (Month 0, 6) compared to 3 doses (Month 0, 1, 6) formulated with Al(OH)₃.

[0027] FIG. 5 shows the neutralization titers of individual animals (NHPs) immunized with C. difficile toxoid antigens with CpG adjuvant alone (0.5 or 3.6 mg/mL CpG) or CpG adjuvant combined with Al(OH)₃ at different levels of CpG (0.5, 1 or 3.6 mg/mL CpG) (2 doses—M 0, 2) compared to formulations with Al(OH)₃ (3 doses). Formulation of toxoid antigens with either CpG or CpG/Al(OH)₃ elicits robust and rapid immune responses able to neutralize TcdB cytotoxicity after 2 doses (Month 0, 2) compared to 3 doses (Month 0, 1, 6) formulated with Al(OH)₃.

[0028] FIG. 6 shows the neutralization titers of individual animals (rats) immunized with C. difficile toxoid antigens formulated with different LiNA-2 adjuvants (homogeneous and heterogeneous).

[0029] FIG. 7 shows the relationship between the % toxoids binding and the mass ratio of the Al(OH)₃/CpG.

### DETAILED DESCRIPTION OF THE INVENTION

[0030] The investigational C. difficile vaccine drug product (also referred to as “PF-06425090” or “Al(OH)₃ formulation”, once reconstituted with Al(OH)₃, herein) includes a mixture of genetically modified C. difficile toxoid A (TxdA), i.e., a polypeptide comprising SEQ ID NO: 4, wherein the initial methionine is not present (for example SEQ ID NO: 84) and genetically modified C. difficile toxoid B (TxdB), i.e., a polypeptide comprising SEQ ID NO: 6, wherein the initial methionine is not present (for example SEQ ID NO: 86) that were further chemically inactivated by 1-ethyl-3-(3-dimethylaminopropyl) carbodiimide) (EDC) and N-Hydroxysuccinimide (NHS) to eliminate residual cytotoxicity but retain native antigenic structure and generate a neutralizing antibody response. The investigational C. difficile vaccine is presented as a sterile lyophilized powder with a 1:1 ratio of TxdA and TxdB, in a dosage strength of 200 μg/dose (total dose for TxdA and TxdB) comprising 10 mM Tris buffer at pH 74, 4.5% (w/w) trehalose dihydrate, and 0.01% (w/v) polysorbate 80. Prior to immunization, the lyophilized powder is reconstituted with 1 mg/mL aluminum as aluminum hydroxide (Al(OH)₃) acting as an adsorbent/diluent for a 0.5 mL IM injection. The reconstituted investigational C. difficile vaccine comprises tromethamine, Tris-HCl, trehalose dihydrate, polysorbate 80, sodium chloride and aluminum in the form of aluminum hydroxide. See WIPO Patent Application WO/2012/143902, U.S. Pat. No. 9,187,536, and WIPO Patent Application WO/2014/060898, which are each incorporated by reference herein in their respective entireties.

[0031] The investigational C. difficile vaccine was designed to induce protective, functional toxin-neutralizing antibody responses against Toxin A (TcdA) and Toxin B (TcdB) from clinically relevant and hypervirulent C. difficile strains. The vaccine is intended to prevent initial/primary C. difficile infection (CDI) episodes in subjects 50 years of age and older. The vaccine has been shown to be safe and well tolerated after a 3 dose regimen. The investigational C. difficile vaccine has been evaluated in multiple clinical studies, including, B5091001, B5091002, B5091003, B5091007, B5091008, B5091009, B5091010, and B5091019. See also WIPO Patent Application WO/2019/064115, WIPO Patent Application WO/2020/201985, and WIPO Patent Application WO/2021,255690, which are each incorporated by reference herein in their respective entireties.

[0032] The investigational C. difficile vaccine reconstituted with Al(OH)₃ is administered at 3 doses schedule (0, 1, 6-month) to elicit a functional immune response required to protect from CDI, in particular, to achieve sufficient toxin-neutralizing titers in subjects with low pre-vaccination toxin B neutralizing titers. Thus, the present invention provides for C. difficile vaccines further comprising an adjuvant to enhance the magnitude, kinetics, and persistence of the anti-toxin immune response to a C. difficile toxoid antigens. The present invention further provides for C. difficile vaccines comprising an adjuvant to enhance the immune response to the C. difficile toxoid antigens, in particular the immune response to toxin B, and potentially reduce the number of doses (2 doses vs 3 doses) required to prevent CDI in humans. Further, a 2 dose schedule would likely increase vaccine adherence and provide an advantage for subjects who have transient risk of CDI. As provided herein, the investigational C. difficile vaccine is formulated with different adjuvants at various doses and compared to the investigational C. difficile vaccine formulated with Al(OH)₃ as an adsorbent.

[0033] The present invention provides for the investigational C. difficile vaccine, as described herein, and further comprising an adjuvant. In particular, the present invention provides for the investigational C. difficile vaccine formulated with a CpG adjuvant, a CpG adjuvant in combination with Al(OH)₃ and/or a saponin containing liposomal adjuvant.

[0034] In one aspect, the immunogenic compositions of the present invention comprise genetically modified C. difficile toxoid A (TxdA), i.e., a polypeptide comprising SEQ ID NO: 4, wherein the initial methionine is not present (for example SEQ ID NO: 84) and genetically modified C. difficile toxoid B (TxdB), i.e., a polypeptide comprising SEQ ID NO: 6, wherein the initial methionine is not present (for example SEQ ID NO: 86) at 200 μg/dose (total dose for TxdA and TxdB) with a 1:1 ratio of TxdA and TxdB, and an adjuvant.

[0035] In one aspect, the adjuvant is a CpG adjuvant, which comprises at least one CpG oligonucleotide, preferably a CpG oligodeoxynucleotides (ODN). In one aspect the CpG is a B class CpG. In one aspect the CpG is CpG 24555, a 21-mer oligodeoxynucleotide TLR9 agonist. In one aspect, the adjuvant comprises CpG alone. In one aspect, the CpG is combined with aluminum hydroxide (Al(OH)₃). In one aspect, the CpG adjuvant comprising CpG 24555 alone, or combined with aluminum hydroxide (Al(OH)₃), is designed to reconstitute lyophilized the investigational C. difficile vaccine drug product for administration.

[0036] In one aspect, the immunogenic composition comprises about 0.1 to about 5 mg/mL CpG. In one aspect, the immunogenic composition comprises about 0.5, about 1.0 or about 3.6 mg/mL CpG. In one aspect, the immunogenic composition comprises 0.5 mg/mL CpG alone, or combined with aluminum hydroxide (AlOH₃). In one aspect, the immunogenic composition comprises 0.5 mg/mL CpG alone. In one aspect, the immunogenic composition comprises 0.5 mg/mL CpG combined with 1.0 mg/mL AlOH₃. In one aspect, the immunogenic composition comprises 0.5 mg/mL CpG combined with 1.5 mg/mL AlOH₃.

[0037] In one aspect, the immunogenic composition comprises 1.0 mg/mL CpG alone, or combined with aluminum hydroxide (AlOH₃). In one aspect, the immunogenic composition comprises 1.0 mg/mL CpG alone. In one aspect, the immunogenic composition comprises 1.0 mg/mL CpG combined with 1.0 mg/mL AlOH₃. In one aspect, the immunogenic composition comprises 1.0 mg/mL CpG combined with 1.5 mg/mL AlOH₃.

[0038] In one aspect, the immunogenic composition comprises 3.6 mg/mL CpG alone, or combined with aluminum hydroxide (AlOH₃). In one aspect, the immunogenic composition comprises 3.6 mg/mL CpG alone. In one aspect, the immunogenic composition comprises 3.6 mg/mL CpG combined with 1.0 mg/mL AlOH₃. In one aspect, the immunogenic composition comprises 3.6 mg/mL CpG combined with 1.5 mg/mL AlOH₃. In one aspect, the immunogenic composition comprises 3.6 mg/mL CpG combined with 1.8 mg/mL aluminum hydroxide AlOH₃.

[0039] In one aspect, the immunogenic composition comprises a CpG combined with about 1.0, about 1.5, about 1.7, about 1.8, about 2.0, or about 2.5 mg/mL Al(OH)₃.

[0040] In a preferred aspect, the CpG adjuvant comprises CpG alone. In a preferred aspect, the CpG adjuvant comprises CpG in a histidine buffer and sodium chloride (NaCl) at a pH of about 6.5. In a preferred aspect, the CpG adjuvant comprises CpG in 10 mM histidine buffer and 60 mM sodium chloride (NaCl) at a pH of about 6.5.

[0041] In a preferred aspect, the CpG adjuvant comprises 3.6 mg/mL CpG 24555 (i.e. high-dose CpG). In a preferred aspect, the CpG adjuvant comprises 3.6 mg/mL CpG 24555 in a histidine buffer and sodium chloride (NaCl) at a pH of about 6.5. In a preferred aspect, the CpG adjuvant comprises 3.6 mg/mL CpG 24555 in 10 mM histidine buffer and 60 mM sodium chloride (NaCl) at a pH of about 6.5.

[0042] In another preferred aspect, the CpG adjuvant comprises 1.0 mg/mL CpG 24555 combined with 1.5 mg/mL AlOH₃ (i.e. low-dose CpG). In another preferred aspect, the CpG adjuvant comprises 1.0 mg/mL CpG 24555 combined with 1.5 mg/mL AlOH₃ in a histidine buffer and sodium chloride (NaCl) at a pH of about 6.5. In another preferred aspect, the CpG adjuvant comprises 1.0 mg/mL CpG combined with 1.5 mg/mL AlOH₃ in 10 mM histidine buffer and 50 mM sodium chloride (NaCl) at a pH of about 6.5.

[0043] In another preferred aspect, the CpG adjuvant comprises CpG combined with AlOH₃ in a histidine buffer and sodium chloride (NaCl) at a pH of about 6.5. In another preferred aspect, the CpG adjuvant comprises CpG combined with AlOH₃ in 10 mM histidine buffer and 50 mM sodium chloride (NaCl) at a pH of about 6.5.

[0044] The present invention provides for immunogenic compositions comprising genetically modified C. difficile toxoid A (TxdA), i.e., a polypeptide comprising SEQ ID NO: 4, wherein the initial methionine is not present (for example SEQ ID NO: 84) and genetically modified C. difficile toxoid B (TxdB), i.e., a polypeptide comprising SEQ ID NO: 6, wherein the initial methionine is not present (for example SEQ ID NO: 86) at 200 μg/dose (total dose for TxdA and TxdB) and a CpG adjuvant comprising CpG 24555. In one aspect, the immunogenic composition comprises 0.5, 1.0, or 3.6 mg/mL CpG 24555. In a preferred aspect, the immunogenic composition comprises 3.6 mg/mL CpG 24555. In a preferred aspect, the immunogenic composition comprises 3.6 mg/mL CpG 24555 in a histidine buffer and sodium chloride (NaCl). In a preferred aspect, the immunogenic composition comprises 3.6 mg/mL CpG 24555 in 10 mM histidine buffer and 60 mM sodium chloride (NaCl).

[0045] In a preferred aspect, the immunogenic composition comprises the investigational C. difficile vaccine and 3.6 mg/mL CpG 24555. In a preferred aspect, the lyophilized investigational C. difficile vaccine is reconstituted with 3.6 mg/mL CpG 24555 in a histidine buffer and sodium chloride (NaCl). In a preferred aspect, the lyophilized investigational C. difficile vaccine is reconstituted with 3.6 mg/mL CpG 24555 in a 10 mM histidine buffer and 60 mM sodium chloride (NaCl).

[0046] The present invention further provides for immunogenic compositions comprising genetically modified C. difficile toxoid A (TxdA), i.e., a polypeptide comprising SEQ ID NO: 4, wherein the initial methionine is not present (for example SEQ ID NO: 84) and genetically modified C. difficile toxoid B (TxdB), i.e., a polypeptide comprising SEQ ID NO: 6, wherein the initial methionine is not present (for example SEQ ID NO: 86) at 200 μg/dose (total dose for TxdA and TxdB), a CpG adjuvant comprising CpG 24555 and aluminum hydroxide Al(OH)₃. In one aspect, the immunogenic composition comprises 0.5, 1.0, or 3.6 mg/mL CpG 24555 and aluminum hydroxide Al(OH)₃. In one aspect, the immunogenic composition comprises CpG 24555 and 1.0 or 1.5 mg/mL aluminum hydroxide Al(OH)₃. In a preferred aspect, the immunogenic composition comprises 1.0 mg/mL CpG 24555 and 1.5 mg/mL aluminum hydroxide Al(OH)₃. In a preferred aspect, the immunogenic composition comprises 1.0 mg/mL CpG 24555 and 1.5 mg/mL AlOH₃ in a histidine buffer and sodium chloride (NaCl). In a preferred aspect, the immunogenic composition comprises 1.0 mg/mL CpG 24555 and 1.5 mg/mL AlOH₃ in 10 mM histidine buffer and 50 mM sodium chloride (NaCl).

[0047] In a preferred aspect, the immunogenic composition comprises the investigational C. difficile vaccine, 1.0 mg/mL CpG 24555 and 1.5 mg/mL aluminum hydroxide Al(OH)₃. In a preferred aspect, the lyophilized investigational C. difficile vaccine is reconstituted with 1.0 mg/mL CpG 24555 and 1.5 mg/mL aluminum hydroxide Al(OH)₃ in a histidine buffer comprising sodium chloride (NaCl). In a preferred aspect, the lyophilized investigational C. difficile vaccine is reconstituted with 1.0 mg/mL CpG 24555 and 1.5 mg/mL aluminum hydroxide Al(OH)₃ in 10 mM histidine buffer and 50 mM sodium chloride (NaCl).

[0048] In one aspect, an adjuvanted immunogenic composition of the present invention comprises a C. difficile toxoid A (TxdA) comprising SEQ ID NO: 4, wherein the initial methionine is not present (for example SEQ ID NO: 84), and a C. difficile toxoid B (TxdB) comprising SEQ ID NO: 6, wherein the initial methionine is not present (for example SEQ ID NO: 86), and a CpG (e.g. CpG 24555) adjuvant alone or in combination with aluminum (e.g. aluminum hydroxide Al(OH)₃).

[0049] In another aspect, the adjuvant is a saponin containing liposomal adjuvant, which comprises a monophosphoryl lipid A (MPLA) and a triterpenoid glycoside saponin (QS-21). In one aspect, the saponin containing liposomal adjuvant further comprises 1,2-dimyristoyl-sn-glycero-3-phosphocholine (DMPC). In one aspect, the saponin containing liposomal adjuvant further comprises 1,2-dimyristoyl-sn-glycero-3-phospho-(1′-rac-glycerol) (DMPG). In one aspect, the saponin containing liposomal adjuvant further comprises cholesterol.

[0050] In a preferred aspect, the saponin containing liposomal adjuvant comprises MPLA (e.g. 3D-PHAD®), QS-21, DMPC, DMPG and cholesterol. In a preferred aspect, the saponin containing liposomal adjuvant comprises 0.4 mg/mL MPLA (e.g. 3D-PHAD®), 0.2 mg/mL QS-21, 14 mg/mL DMPC, 1.6 mg/mL DMPG and 11/mg/mL cholesterol (i.e. LiNA-2). In another preferred aspect, the saponin containing liposomal adjuvant comprises MPLA (e.g. 3D-PHAD®), QS-21, DMPC, DMPG and cholesterol in a phosphate buffer and sodium chloride (NaCl). In another preferred aspect, the saponin containing liposomal adjuvant comprises MPLA (e.g. 3D-PHAD®), QS-21, DMPC, DMPG and cholesterol in 10 mM phosphate buffer and 150 mM sodium chloride (NaCl). In another preferred aspect, the saponin containing liposomal adjuvant comprises MPLA (e.g. 3D-PHAD®), QS-21, DMPC, DMPG and cholesterol in a phosphate buffer and sodium chloride (NaCl) at a pH of about 6.2. In a preferred aspect, the saponin containing liposomal adjuvant is designed to reconstitute the lyophilized investigational C. difficile vaccine drug product for administration.

[0051] The present invention further provides for immunogenic compositions comprising genetically modified C. difficile toxoid A (TxdA), i.e., a polypeptide comprising SEQ ID NO: 4, wherein the initial methionine is not present (for example SEQ ID NO: 84) and genetically modified C. difficile toxoid B (TxdB), i.e., a polypeptide comprising SEQ ID NO: 6, wherein the initial methionine is not present (for example SEQ ID NO: 86) at 200 μg/dose (total dose for TxdA and TxdB) and a saponin containing liposomal adjuvant (e.g. LiNA-2). In one aspect, the immunogenic composition comprises a saponin containing liposomal adjuvant comprising MPLA (e.g. 3D-PHAD®) and QS-21. In a preferred aspect, the immunogenic composition comprises a saponin containing liposomal adjuvant comprising MPLA (e.g. 3D-PHAD®), QS-21, DMPC, DMPG and cholesterol in a phosphate buffer and sodium chloride (NaCl). In a preferred aspect, the immunogenic composition comprises a saponin containing liposomal adjuvant comprising MPLA (e.g. 3D-PHAD®), QS-21, DMPC, DMPG and cholesterol in a 10 mM phosphate buffer and 150 mM sodium chloride (NaCl). In a preferred aspect, the immunogenic composition comprises 0.4 mg/mL MPLA (e.g. 3D-PHAD®), 0.2 mg/mL QS-21, 14 mg/mL DMPC, 1.6 mg/mL DMPG and 11/mg/mL cholesterol. In a preferred aspect, the immunogenic composition comprises 0.4 mg/mL MPLA (e.g. 3D-PHAD®), 0.2 mg/mL QS-21, 14 mg/mL DMPC, 1.6 mg/mL DMPG and 11/mg/mL cholesterol in a 10 mM phosphate buffer and 150 mM sodium chloride (NaCl).

[0052] In a preferred aspect, the immunogenic composition comprises the investigational C. difficile vaccine, 0.4 mg/mL MPLA (e.g. 3D-PHAD®), 0.2 mg/mL QS-21, 14 mg/mL DMPC, 1.6 mg/mL DMPG and 11/mg/mL cholesterol. In a preferred aspect, the lyophilized investigational C. difficile vaccine is reconstituted with 0.4 mg/mL MPLA (e.g. 3D-PHAD®), 0.2 mg/mL QS-21, 14 mg/mL DMPC, 1.6 mg/mL DMPG and 11/mg/mL cholesterol in a phosphate buffer and sodium chloride (NaCl). In a preferred aspect, the lyophilized investigational C. difficile vaccine is reconstituted with 0.4 mg/mL MPLA (e.g. 3D-PHAD®), 0.2 mg/mL QS-21, 14 mg/mL DMPC, 1.6 mg/mL DMPG and 11/mg/mL in a 10 mM phosphate buffer and 150 mM sodium chloride (NaCl). In a preferred aspect, the immunogenic composition comprises the investigational C. difficile vaccine and LiNA-2. In a preferred aspect, the lyophilized investigational C. difficile vaccine is reconstituted with LiNA-2 in a phosphate buffer comprising sodium chloride (NaCl). In a preferred aspect, the lyophilized investigational C. difficile vaccine is reconstituted with LiNA-2 in 10 mM phosphate buffer and 150 mM sodium chloride (NaCl).

[0053] In one aspect, an adjuvanted immunogenic composition of the present invention comprises a C. difficile toxoid A (TxdA) comprising SEQ ID NO: 4, wherein the initial methionine is not present (for example SEQ ID NO: 84), and a C. difficile toxoid B (TxdB) comprising SEQ ID NO: 6, wherein the initial methionine is not present (for example SEQ ID NO: 86), and a saponin containing liposomal adjuvant (e.g. LiNA-2).

[0054] In one aspect, immunogenic compositions of the present invention are prepared by reconstituting the lyophilized investigational C. difficile vaccine for injection with either CpG (e.g. CpG 24555), CpG (e.g. CpG 24555) combined with aluminum hydroxide (AlOH₃), or a saponin containing liposomal adjuvant (e.g. LiNA-2). The reconstituted immunogenic compositions are withdrawn in the syringe using the vial adapter to enable a dose of 0.5 mL for IM administration.

[0055] In one aspect, immunogenic compositions of the present invention are prepared by reconstituting the lyophilized investigational C. difficile vaccine for injection with aluminum hydroxide (AlOH₃) adsorbent (current formulation). The reconstituted immunogenic compositions are presented as a sterile liquid suspension in a dosage strength of 1 mg/mL aluminum in the form of aluminum hydroxide containing sodium chloride (NaCl).

[0056] In one aspect, the immunogenic compositions disclosed herein are administered two times each dose being separated from one another by about one to about four months. In one aspect, the immunogenic compositions disclosed herein are administered two times each dose being separated from one another by about one, two, three or four months. In a preferred aspect, the immunogenic compositions disclosed herein are administered two times each dose being separated from one another by about two months. In one aspect, methods of the present invention include administering a first dose and a second dose of a immunogenic composition described herein, preferably the second dose is administered about 2 months after the first dose (M 0, 2).

[0057] In another aspect, the immunogenic compositions disclosed herein are administered two times each dose being separated from one another by about one to about eight months. In one aspect, the immunogenic compositions disclosed herein are administered two times each dose being separated from one another by about one, two, three, four, five, six, seven or eight months. In a preferred aspect, the immunogenic compositions disclosed herein are administered two times each dose being separated from one another by about six months. In one aspect, methods of the present invention include administering a first dose and a second dose of a immunogenic composition described herein, preferably the second dose is administered about 6 months after the first dose (M 0, 6).

[0058] In one aspect, the method includes further administration of a booster dose after the second dose, e.g. 6 months or 12 months after the second dose. Further boosters may be administered. In one aspect, the method does not include further administration of a booster after the second dose.

[0059] In one aspect, the immunogenic compositions disclosed herein are administered three times the first and second dose being separated from one another by about one to about four months and the third dose being separated from the first dose by about 5 to 10 months. In a preferred aspect, the immunogenic compositions disclosed herein are administered three times the first and second dose being separated from one another by about one month and the third dose being separated from the first dose by about 6 months. In one aspect, methods of the present invention include administering a first dose, a second dose and a third dose of a immunogenic composition described herein, preferably the second dose is administered about 1 month after the first dose and the third dose is administered about 6 months after the first dose (M 0, 1, 6).

[0060] In one aspect, the method includes further administration of a booster dose after the third dose, e.g. 6 months or 12 months after the third dose. Further boosters may be administered. In one aspect, the method does not include further administration of a booster after the third dose.

[0061] Examples 1 to 4 of the present invention compare the relative immunogenicity in nonhuman primates (NHPs) of C. difficile toxoid antigens formulated with adjuvant formulations compared to an Al(OH)₃ formulation. The formulations were assessed for enhanced immune responses, in particular the immune response to toxin B, and potential reduction in the number of doses (2 doses vs 3 doses) required to prevent C. difficile infection (CDI) in humans.

[0062] As provided in the examples herein, multiple immunogenicity studies were conducted in NHPs to compare the functional response of adjuvanted formulations to Al(OH)₃ formulated toxoid antigens. See Examples 1-4. The adjuvanted formulations including a CpG adjuvant (e.g. CpG 24555), both with and without Al(OH)₃, as well as a saponin containing liposomal adjuvant (e.g. LiNA-2), elicited a robust and more rapid immune response in NHPs following 2 doses (at Month 0, 2 or Month 0, 6) compared to 3 doses (at Months 0, 1, and 6) of the Al(OH)₃ formulation.

[0063] As further provided in the examples herein, dose-ranging immunogenicity studies were conducted with CpG-adjuvanted C. difficile toxoid antigens in NHPs. The functional immune response to 2 doses (at Months 0, 2) of toxoid antigen increased in parallel with the amount of CpG included (0.5, 1.0, and 3.6 mg/mL CpG 24555) when formulated together with Al(OH)₃. The inclusion of CpG at either 1.0 or 3.6 mg/mL elicited a more rapid and robust immune response than 3 doses of the Al(OH)₃ formulation. See Examples 3 and 4. The functional immune response to 2 doses (at Months 0, 2) of toxoid antigen formulated with either 0.5 or 3.6 mg/mL CpG alone (no Al(OH)₃) was also evaluated in NHPs. Both elicited a more rapid response compared to 3 doses of the Al(OH)₃ formulation. See Example 4.

[0064] Example 5 provides immunogenicity studies conducted with homogeneous and heterogenous LiNA-2-adjuvanted C. difficile toxoid antigens in rats. The toxoids formulated with homogeneous and heterogeneous saponin containing liposomal adjuvant (e.g. LiNA-2) elicited similar immune responses able to neutralize Toxin B cytotoxicity.

[0065] Example 6 of the present invention provides binding studies with various CpG and Al(OH)₃ concentrations and ratios to understand the binding properties of the C. difficile toxoids and CpG adjuvant.

[0066] Example 7 of the present invention provides binding and resuspension studies for various CpG/Al(OH)₃ formulations to assess the properties of the C. difficile toxoids and CpG adjuvant.

[0067] Example 8 provides preferred immunogenic compositions and administration regimens of the present invention. For example, immunogenic compositions formulated with CpG adjuvant alone, CpG adjuvant+Al(OH)₃ and/or a saponin containing liposomal adjuvant (LiNA-2) administered in 2 doses (e.g. M 0, 2 or M 0, 6).

### Composition and Vaccine

[0068] In one aspect, the composition is an immunogenic composition. In one aspect, the composition is an immunogenic composition for a human. In another aspect, the composition is a vaccine. A “vaccine” refers to a composition that includes an antigen, which contains at least one epitope that induces an immune response that is specific for that antigen. The vaccine may be administered directly into the subject by subcutaneous, oral, oronasal, or intranasal routes of administration. Preferably, the vaccine is administered intramuscularly. In one aspect, the composition is a human vaccine. In one aspect, the composition is an immunogenic composition against C. difficile. In certain aspects, the compositions may further comprise one or more C. difficile antigens, one or more pharmaceutically acceptable carriers and/or one or more adjuvants, as described herein.

[0069] As described above, the investigational C. difficile vaccine (also referred to as “PF-06425090” or “Al(OH)₃ formulation”, once reconstituted with Al(OH)₃, herein) includes a mixture of genetically modified C. difficile toxoid A (TxdA), i.e., a polypeptide comprising SEQ ID NO: 4, wherein the initial methionine is not present (for example SEQ ID NO: 84) and genetically modified C. difficile toxoid B (TxdB), i.e., a polypeptide comprising SEQ ID NO: 6, wherein the initial methionine is not present (for example SEQ ID NO: 86) that were further chemically inactivated by 1-ethyl-3-(3-dimethylaminopropyl) carbodiimide) (EDC) and N-Hydroxysuccinimide (NHS). The vaccine is presented as a lyophilized powder with a 1:1 ratio of TxdA and TxdB in a dosage strength of 200 μg/dose (total dose for TxdA and TxdB). Prior to immunization, the investigational C. difficile vaccine is reconstituted with Al(OH)₃ as an adsorbent. The vaccine is administered in 3 doses (M 0, 1, 6).

[0070] The present invention provides for the investigational C. difficile vaccine formulated to include an oligonucleotide CpG adjuvant (e.g. CpG 24555), a CpG adjuvant (e.g. CpG 24555) combined with Al(OH)₃ and/or a saponin containing liposomal adjuvant (e.g. LiNA-2) to enhance the immune response, in particular the immune response to toxin B, thus providing a more rapid onset of protection and use of a 2-dose regimen (M 0, 2 or Month 0, 6). The adjuvanted vaccine compositions described herein are presented as a lyophilized dosage form (investigational C. difficile vaccine) and prepared for injection by reconstituting with either an oligonucleotide CpG adjuvant (e.g. CpG 24555), an oligonucleotide CpG adjuvant (e.g. CpG 24555) combined with aluminum hydroxide Al(OH)₃, or a saponin containing liposomal adjuvant (e.g. LiNA-2).

C. difficile Toxoids

[0071] The term “C. difficile toxoid” is used herein to refer to a C. difficile toxin (Toxin A or Toxin B) that has been partially or completely inactivated. A toxin is inactivated if it has less toxicity (e.g., 100%, 99%, 98%, 80%, 70%, 60%, 50%, 40%, 30%, 20%, 10% or less toxicity or any value therebetween) than untreated toxin, as measured by for example an in vitro cytotoxicity assay or by animal toxicity. C. difficile toxoids can be produced by purification of toxins from C. difficile cultures and inactivation of toxins by chemical (e.g., formaldehyde, glutaraldehyde, peroxide or oxygen treatment). Alternatively, wild type or mutant C. difficile toxins that lack or have reduced toxicity can be produced using recombinant methods and/or alternative chemical crosslinking agents. For example, genetic mutations resulting in reduced toxicity can be made. Wild type or mutant C. difficile toxins lacking specific regions to reduce toxicity can also be made.

[0072] The C. difficile toxoid or mutant C. difficile toxin refers to a molecule that exhibits a structure or sequence that differs from the corresponding wild-type structure or sequence, e.g., by having crosslinks as compared to the corresponding wild-type structure and/or by having at least one mutation, as compared to the corresponding wild-type sequence when optimally aligned, such as by the programs GAP or BESTFIT using default gap weights. The term toxoid or mutant toxin as used herein further exhibits a functional property (e.g., abrogated glucosyltransferase and/or abrogated cysteine protease activity) that differs from the corresponding wild-type molecule.

[0073] The toxoid as used herein may be any of the toxoids or mutant C. difficile toxins as described in WIPO Patent Application WO/2012/143902, U.S. Pat. No. 9,187,536, and WIPO Patent Application WO/2014/060898, which are each incorporated by reference herein in their respective entireties. That is, the toxoid as used herein may be any of the polypeptides as described in WIPO Patent Application WO/2012/143902, U.S. Pat. No. 9,187,536, and WIPO Patent Application WO/2014/060898, which are each incorporated by reference herein in their respective entireties. A C. difficile toxin from any of the wild-type strains described above may be used as a source from which a toxoid or mutant C. difficile toxin is produced. Preferably, C. difficile 630 is the source from which a C. difficile toxoid is produced.

[0074] In one aspect, the toxoid refers to a polypeptide that has any one sequence selected from the toxoid polypeptides of SEQ ID NO: 1 to SEQ ID NO: 861, wherein the initial methionine is absent, and wherein the polypeptide has been contacted with a chemical crosslinker, such as, for example, formaldehyde or EDC, as described herein, and/or has been genetically mutated. More specifically, in one aspect, the toxoid is a polypeptide having the amino acid sequence set forth in any one of SEQ ID NOs: 1-8, 15, 17, 19, 21, 23, 25, 28-35, 82-761, and 762-840. In another aspect, the polypeptide has an amino acid sequence that is about 60%, 65%, 70%, 75%, 80%, 85%, 86%, 87%, 88%, 89%, 90%, 91%, 92%, 93%, 94%, 95%, 96%, 97%, 98%, 99%, or 100% identical to any one of SEQ ID NOs: 1-8, 15, 17, 19, 21, 23, 25, 28-35, 82-761, and 762-840. In another aspect, the polypeptide has an amino acid sequence having at least 500, 550, 600, 650, 700, 750, 800, 850, 900, 950, 1000, 1050, 1100, 1150, 1200, 1250, 1300, 1350, 1400, 1450, 1500, 1550, 1600, 1650, 1700, 1750, 1800, 1850, 1900, 1950, 2000, 2050, 2100, 2150, or 2200 consecutive amino acids to any one of SEQ ID NOs: 1-8, 15, 17, 19, 21, 23, 25, 28-35, 82-761, and 762-840.

[0075] The mutation may involve a substitution, deletion, truncation or modification of the wild type amino acid residue normally located at that position. Accordingly, the polypeptide may be any one of a fusion polypeptide, glycosylated polypeptide, non-glycosylated polypeptide, lipidated polypeptide, non-lipidated polypeptide, phosphorylated polypeptide, non-phosphorylated polypeptide, myristoylated polypeptide, non-myristoylated polypeptide, monomeric polypeptide, multimeric polypeptide, particulate polypeptide, denatured polypeptide, etc. Preferably, the mutation is a non-conservative amino acid substitution. The mutant toxins of the invention may be prepared by techniques known in the art for preparing mutations, such as, for example, site-directed mutagenesis, mutagenesis using a mutagen (e.g., UV light), etc. Preferably, site-directed mutagenesis is used. Alternatively, a nucleic acid molecule having an objective sequence may be directly synthesized. Such chemical synthesis methods are known in the art.

[0076] In the present invention, the mutant C. difficile toxin includes at least one mutation in a glucosyltransferase domain, relative to the corresponding wild-type C. difficile toxin. In one aspect, the glucosyltransferase domain includes at least two mutations. Preferably, the mutation decreases or abrogates glucosyltransferase enzyme activity of the toxin, as compared to the glucosyltransferase enzyme activity of the corresponding wild-type C. difficile toxin.

[0077] An exemplary C. difficile toxoid A includes the amino acid sequence set forth in SEQ ID NO: 4, wherein the initial methionine is not present. SEQ ID NO: 4 has D285A, D287A and C700A mutations, as compared to SEQ ID NO: 1 (wild-type toxin A). In another aspect, the mutant C. difficile toxin A includes the amino acid sequence set forth in SEQ ID NO: 84. In another aspect, the C. difficile toxoid A includes a glucosyltransferase domain including SEQ ID NO: 29 having an amino acid substitution at positions 285 and 287, and a cysteine protease domain comprising SEQ ID NO: 32 having an amino acid substitution at position 158, relative to the corresponding wild-type C. difficile toxin A. In another aspect, the C. difficile toxoid A includes the amino acid sequence set forth in SEQ ID NO: 1, wherein the initial methionine is not present, having D285A, D287A, and C700A mutations.

[0078] Further examples of a C. difficile toxoid A include the amino acid sequence set forth in SEQ ID NO: 7, which has a D269A, R272A, D285A, D287A, E460A, R462A, and C700A mutation, as compared to SEQ ID NO: 1, wherein the initial methionine is optionally not present. In another aspect, the mutant C. difficile toxin A includes the amino acid sequence set forth in SEQ ID NO: 83.

[0079] An exemplary C. difficile toxoid B includes the amino acid sequence set forth in SEQ ID NO: 6, wherein the initial methionine is not present. SEQ ID NO: 6 has D286A, D288A and C689A mutations, as compared to SEQ ID NO: 2 (wild-type toxin B). In another aspect, the mutant C. difficile toxin A includes the amino acid sequence set forth in SEQ ID NO: 86.

[0080] Further examples of a mutant C. difficile TcdB include the amino acid sequence set forth in SEQ ID NO: 8, which has a D270A, R273A, D286A, D288A, D461A, K463A, and C698A mutation, as compared to SEQ ID NO: 2, and wherein the initial methionine of SEQ ID NO: 8 is optionally not present. In another aspect, the mutant C. difficile toxin B includes the amino acid sequence set forth in SEQ ID NO: 85. In another aspect, the C. difficile toxoid B includes the amino acid sequence set forth in SEQ ID NO: 2, wherein the initial methionine is not present, having D286A, D288A and C689A mutations.

[0081] In addition to generating an immune response in a mammal, the toxoids described herein also have reduced cytotoxicity compared to the corresponding wild-type C. difficile toxin. Preferably, the immunogenic compositions are safe and have minimal (e.g., about a 6-8 log₁₀ reduction) to no cytotoxicity, relative to the cytotoxicity of a respective wild-type toxin, for administration in mammals.

[0082] As used herein, the term cytotoxicity is a term understood in the art and refers to apoptotic cell death and/or a state in which one or more usual biochemical or biological functions of a cell are aberrantly compromised, as compared to an identical cell under identical conditions but in the absence of the cytotoxic agent. Toxicity can be quantitated, for example, in cells or in mammals as the amount of an agent needed to induce 50% cell death (i.e., EC₅₀ or ED₅₀, respectively) or by other methods known in the art.

[0083] In one aspect, the toxoid is a polypeptide that has any one sequence selected from the toxoid polypeptides of SEQ ID NO: 1 to SEQ ID NO: 861, more specifically, the toxoid is a polypeptide having the amino acid sequence set forth in any one of SEQ ID NOs: 1-8, 15, 17, 19, 21, 23, 25, 28-35, 82-761, and 762-840, wherein the initial methionine is absent, and wherein the polypeptide has been contacted with a chemical crosslinker, such as, for example, formaldehyde or EDC, as described herein. Crosslinking (also referred to as “chemical inactivation” or “inactivation” herein) is a process of chemically joining two or more molecules by a covalent bond. The terms “crosslinking reagents,” “crosslinking agents,” and “crosslinkers” refer to molecules that are capable of reacting with and/or chemically attaching to specific functional groups (primary amines, sulfhydryls, carboxyls, carbonyls, etc.) on peptides, polypeptides, and/or proteins. In one aspect, the molecule may contain two or more reactive ends that are capable of reacting with and/or chemically attaching to specific functional groups (primary amines, sulfhydryls, carboxyls, carbonyls, etc.) on peptides, polypeptides, and/or proteins. Preferably, the chemical crosslinking agent is water-soluble. In another preferred aspect, the chemical crosslinking agent is a heterobifunctional crosslinker. In another aspect, the chemical crosslinking agent is not a bifunctional crosslinker. Chemical crosslinking agents are known in the art.

[0084] Exemplary suitable chemical crosslinking agents include formaldehyde; formalin; acetaldehyde; propionaldehyde; water-soluble carbodiimides (RN═C═NR′), which include 1-Ethyl-3-(3-Dimethylaminopropyl)-Carbodiimide (EDC), 1-Ethyl-3-(3-Dimethylaminopropyl)-Carbodiimide Hydrochloride, 1-Cyclohexyl-3-(2-morpholinyl-(4-ethyl)carbodiimide metho-p-toluenesulfonate (CMC), N,N′-dicyclohexylcarbodiimide (DCC), and N,N′-diisopropylcarbodiimide (DIC), and derivatives thereof; and N-hydroxysuccinimide (NHS); phenylglyoxal; and/or UDP-dialdehyde.

[0085] In another aspect, the at least one amino acid may be chemically crosslinked by an agent that includes EDC and NHS. For example, in one aspect, the invention relates to an isolated polypeptide having the amino acid sequence set forth in SEQ ID NO: 4, wherein the methionine residue at position 1 is optionally not present, wherein the polypeptide includes at least one amino acid side chain chemically modified by EDC and NHS. In another aspect, the invention relates to an isolated polypeptide having the amino acid sequence set forth in SEQ ID NO: 6, wherein the methionine residue at position 1 is optionally not present, wherein the polypeptide includes at least one amino acid side chain chemically modified by EDC and NHS. In yet another aspect, the invention relates to an isolated polypeptide having the amino acid sequence set forth in SEQ ID NO: 84, SEQ ID NO: 86, SEQ ID NO: 83, SEQ ID NO: 85, SEQ ID NO: 7, or SEQ ID NO: 8. The polypeptide is modified by contacting the polypeptide with EDC and NHS.

[0086] As yet another example of a chemically crosslinked mutant C. difficile toxin, i.e., a polypeptide, the at least one amino acid may be chemically crosslinked by an agent that includes formaldehyde. Formaldehyde may react with the amino group of an N-terminal amino acid residue and the side-chains of arginine, cysteine, histidine, and lysine. Formaldehyde and glycine may form a Schiff-base adduct, which may attach to primary N-terminal amino groups, arginine, and tyrosine residues, and to a lesser degree asparagine, glutamine, histidine, and tryptophan residues.

[0087] A chemical crosslinking agent is said to reduce cytotoxicity of a toxin if the treated toxin has less toxicity (e.g., about 100%, 99%, 95%, 90%, 80%, 75%, 60%, 50%, 25%, or 10% less toxicity) than untreated toxin under identical conditions, as measured, for example, by an in vitro cytotoxicity assay, or by animal toxicity.

[0088] In one aspect, a immunogenic composition of the present invention comprises a polypeptide having the amino acid sequence SEQ ID NO: 4, wherein the methionine is not present (toxoid A), for example SEQ ID NO: 84, and a second polypeptide having the amino acid sequence SEQ ID NO: 6, wherein the methionine is not present (toxoid B), for example SEQ ID NO: 86, and an adjuvant, such as a CpG adjuvant or a saponin containing liposomal adjuvant.

[0089] In one aspect, immunogenic compositions comprising an effective amount of C. difficile toxoid A and toxoid B (e.g., from about 40 to about 500 μg/dose, such as about any of 40, 50, 60, 70, 80, 90, 100, 110, 120, 130, 140, 150, 160, 170, 180, 190, 200, 210, 220, 230, 240, 250, 260, 270, 280, 290, 300, 310, 320, 330, 340, 350, 360, 370, 380, 390, 400, 410, 420, 430, 440, 450, 460, 470, 480, 490, or 500 μg/dose, such as about 50 to about 100 μg/dose (w/w, total amount of toxoids A and B in the composition)) at an effective toxoid A:B ratio (e.g., about any of 10%, 20%, 30%, 40%, 50%, 60%, 70%, 3:1, 3:2, or 1:1 toxoid A to toxoid B by weight), and with a sufficient purity (e.g., at least about 80 to about 100%, such as about any of 80, 85, 90, 95 or 90-100% (w/w)), using one or more administrations (e.g., at least two, three administrations or doses) by any suitable route (e.g., intramuscularly), each dose of a multiple dose administration regimen being suitably separated from one another (e.g., by at least about one to about ten days, such as about any of one, two, three, four, five, six, seven, eight, nine or ten, such as about seven days or by at least one to about seven months, such as about any one of one, two, three, four, five, six, or seven months) are provided. The length of time (time interval) between doses would be understood by those of ordinary skill to vary depending on the individual and that that interval should be long enough (e.g., as measured in days or months) such that the immune response from the prior dose both has time to develop (e.g., to be primed) and is not in any way inhibited by the subsequent dose (e.g., the boosting dose or doses).

[0090] In one aspect, the immunogenic composition used in the vaccination regimen of the present invention includes from about 40 to about 500 μg/dose of C. difficile toxoid A. In an aspect the composition includes from about 50 to about 400 μg/dose of C. difficile toxoid A. In one aspect, the composition includes from about 50 to about 200 μg/dose of C. difficile toxoid A. In one aspect the composition includes from about 50 to about 150 μg/dose. In one aspect the composition includes about any of 40, 50, 60, 70, 80, 90, 100, 110, 120, 130, 140, 150, 160, 170, 180, 190, 200, 210, 220, 230, 240, 250, 260, 270, 280, 290, 300, 310, 320, 330, 340, 350, 360, 370, 380, 390, 400, 410, 420, 430, 440, 450, 460, 470, 480, 490, or 500 μg/dose of C. difficile toxoid A. In one aspect, the composition includes about 50 μg/dose of C. difficile toxoid A. In another aspect, the composition includes about 100 μg/dose of C. difficile toxoid A.

[0091] In one aspect the immunogenic composition used in the vaccination regimen of the present invention includes from about 40 to about 500 μg/dose of C. difficile toxoid B. In one aspect the composition includes from about 50 to about 400 μg/dose of C. difficile toxoid B. In one aspect the composition includes from about 50 to about 200 μg/dose of C. difficile toxoid B. In one aspect the composition includes from about 50 to about 150 μg/dose. In one aspect the composition includes about any of 40, 50, 60, 70, 80, 90, 100, 110, 120, 130, 140, 150, 160, 170, 180, 190, 200, 210, 220, 230, 240, 250, 260, 270, 280, 290, 300, 310, 320, 330, 340, 350, 360, 370, 380, 390, 400, 410, 420, 430, 440, 450, 460, 470, 480, 490, or 500 μg/dose of C. difficile toxoid B. In one aspect, the composition includes about 50 μg/dose of C. difficile toxoid B. In another aspect, the composition includes about 100 μg/dose of C. difficile toxoid B.

[0092] In one aspect, the immunogenic composition used in the vaccination regimen of the present invention includes C. difficile toxoid A and B at the doses disclosed herein. In one aspect, the toxoid A to B ratio is 3:1, 3:2, or 1:1 toxoid A to toxoid B by weight. In one aspect, the toxoid A to B ratio is 1:3, 2:3, or 1:1 toxoid A to toxoid B by weight. In one aspect, the toxoid A to B ratio is 1:1 toxoid A to toxoid B by weight. In one aspect the composition used in the vaccination regimen of the present invention includes C. difficile toxoid A and B with a purity of at least about 80 to about 100%. In one aspect the composition used in the vaccination regimen of the present invention includes C. difficile toxoid A and B with a purity of at least about 90 to about 100%. In one aspect the composition used in the vaccination regimen of the present invention includes C. difficile toxoid A and B with a purity of about 80, 85, 90, 95 or 100% (w/w).

### Pharmaceutically Acceptable Carriers

[0093] In one aspect, the immunogenic compositions described herein may further comprise one or more pharmaceutically acceptable carriers and/or one or more adjuvants. In one aspect, the C. difficile toxoids A and/or B as described herein may be combined with one or more pharmaceutically acceptable carriers to provide a composition prior to administration. In one aspect, the composition, which may be a vaccine, may be provided as a lyophilized formulation that may be reconstituted at the clinical site with diluent, and/or mixed with adjuvant, when specified.

[0094] A pharmaceutically acceptable carrier is a material that is not biologically or otherwise undesirable, e.g., the material may be administered to a subject, without causing any undesirable biological effects or interacting in a deleterious manner with any of the other components of the pharmaceutical composition in which it is contained. The carrier would naturally be selected to minimize any degradation of the active ingredient and to minimize any adverse side effects in the subject, as would be well known to one of skill in the art. Suitable pharmaceutical carriers and their formulations are described in, for example, Remington's: The Science and Practice of Pharmacy, 27^{th} Edition, David B. Troy, ed., Lippicott Williams & Wilkins (2005), and may be appropriate Typically, an appropriate amount of a pharmaceutically-acceptable salt is used in the formulation to render the formulation isotonic.

[0095] Examples of the pharmaceutically acceptable carriers include, but are not limited to, sterile water, saline, buffered solutions like Ringer's solution, and dextrose solution. The pH of the solution is generally from about 5 to about 8 or from about 7 to about 7.5. Other carriers include sustained-release preparations such as semipermeable matrices of solid hydrophobic polymers containing polypeptides or fragments thereof. Matrices may be in the form of shaped articles, e.g., films, liposomes or microparticles. It will be apparent to those persons skilled in the art that certain carriers may be more preferable depending upon, for instance, the route of administration and concentration of composition being administered. Carriers are those suitable for administration to humans or other subjects.

[0096] In one aspect, the composition includes a pharmaceutically acceptable carrier(s), which refer to any solvents, dispersion media, stabilizers, diluents, and/or buffers that are physiologically suitable. Exemplary stabilizers include carbohydrates, such as sorbitol, mannitol, starch, dextran, sucrose, trehalose, lactose, and/or glucose; inert proteins, such as albumin and/or casein; and/or other large, slowly metabolized macromolecules, such as polysaccharides such as chitosan, polylactic acids, polyglycolic acids and copolymers (such as latex functionalized SEPHAROSE™ agarose, agarose, cellulose, etc.), amino acids, polymeric amino acids, amino acid copolymers, and lipid aggregates (such as oil droplets or liposomes). Additionally, these carriers may function as immunostimulating agents (i.e., adjuvants).

[0097] Preferably, the C. difficile immunogenic composition includes trehalose. Preferred amounts of trehalose (% by weight) include from a minimum of about 1%, 2%, 3%, or 4% to a maximum of about 10%, 9%, 8%, 7%, 6%, or 5%. Any minimum value can be combined with any maximum value to define a suitable range. In one aspect, the composition includes about 3% to about 6% trehalose, most preferably, about 4.5% trehalose, for example, per 0.5 mL dose.

[0098] Exemplary buffers include phosphate (such as potassium phosphate, sodium phosphate); acetate (such as sodium acetate); succinate (such as sodium succinate); glycine; histidine; carbonate, Tris (tris(hydroxymethyl)aminomethane), and/or bicarbonate (such as ammonium bicarbonate) buffers.

[0099] Preferably, the C. difficile immunogenic composition includes a Tris buffer. Preferred amounts of Tris buffer include from a minimum of about 1 mM, 5 mM, 6 mM, 7 mM, 8 mM, 9 mM, 10 mM to a maximum of about 100 mM, 50 mM, 20 mM, 19 mM, 18 mM, 17 mM, 16 mM, 15 mM, 14 mM, 13 mM, 12 mM, or 11 mM. Any minimum value can be combined with any maximum value to define a suitable range. In one aspect, the composition includes about 10 mM to about 15 mM Tris buffer, more preferably, about 8 mM to about 12 mM Tris buffer, most preferably, about 10 mM Tris buffer, for example, per 0.5 mL dose.

[0100] In another aspect, the C. difficile immunogenic composition includes histidine buffer. Preferred amounts of histidine buffer include from a minimum of about 1 mM, 5 mM, 6 mM, 7 mM, 8 mM, 9 mM, 10 mM to a maximum of about 100 mM, 50 mM, 20 mM, 19 mM, 18 mM, 17 mM, 16 mM, 15 mM, 14 mM, 13 mM, 12 mM, or 11 mM. Any minimum value can be combined with any maximum value to define a suitable range. In one aspect, the composition includes about 10 mM to about 15 mM histidine buffer, more preferably, about 8 mM to about 12 mM histidine buffer most preferably, about 10 mM histidine buffer, for example, per 0.5 mL dose.

[0101] In another aspect, the C. difficile immunogenic composition includes phosphate buffer. Preferred amounts of phosphate buffer include from a minimum of about 1 mM, 5 mM, 6 mM, 7 mM, 8 mM, 9 mM, 10 mM to a maximum of about 100 mM, 50 mM, 2 mM, 19 mM, 18 mM, 17 mM, 16 mM, 15 mM, 14 mM, 13 mM, 12 mM, or 11 mM. Any minimum value can be combined with any maximum value to define a suitable range. In one aspect, the composition includes about 10 mM to about 15 mM phosphate buffer, more preferably, about 8 mM to about 12 mM phosphate buffer, most preferably, about 10 mM phosphate buffer, for example, per 0.5 mL dose. In some aspects, the composition includes a surfactant. Any surfactant is suitable, whether it is amphoteric, non-ionic, cationic or anionic. Exemplary surfactants include the polyoxyethylene sorbitan esters surfactants (e.g., TWEEN @), such as polysorbate 20 and/or polysorbate 80; polyoxyethylene fatty ethers derived from lauryl, cetyl, stearyl and oleyl alcohols (known as BRIJ surfactants), such as triethyleneglycol monolauryl ether (BRIJ 30); TRITON X 100, or t-octylphenoxypolyethoxyethanol; and sorbitan esters (commonly known as the SPANs), such as sorbitan trioleate (SPAN 85) and sorbitan monolaurate, and combinations thereof. Preferred surfactants include polysorbate 80 (polyoxyethylene sorbitan monooleate).

[0102] Polysorbate 80 (PS-80) is a non-ionic surfactant. In one aspect, the composition includes a PS-80 concentration ranging from 0.0005% to 1%. For example, the PS-80 concentration in the composition may be at least 0.0005%, 0.005%, 0.01%, 0.02%, 0.03%, 0.04%, 0.05%, 0.06%, 0.07%, 0.08%, 0.09%, 0.10%, 0.2%, 0.3%, 0.4%, 0.5%, 0.6%, 0.7%, 0.8%, 0.9%, 1%, or 1.1% PS-80. In one aspect, the PS-80 concentration in the composition may be at most 2.0%, 1.9%, 1.8%, 1.7%, 1.6%, 1.5%, 1.4%, 1.3%, 1.2%, 1.1%, 1.0%, 0.9%, 0.8%, or 0.7% PS-80. Any minimum value may be combined with any maximum value described herein to define a range. Preferably, the composition comprises about 0.01% PS-80.

[0103] In an exemplary aspect, the immunogenic composition of the present invention comprises C. difficile Toxoid A and Toxoid B in trehalose, Tris buffer and polysorbate 80. In another exemplary aspect, the immunogenic composition of the present invention is a lyophilized composition comprising C. difficile Toxoid A and Toxoid B in trehalose, Tris buffer and polysorbate 80 and is reconstituted with an adjuvant or adsorbent. For example, a CpG adjuvant comprising a CpG alone or a CpG and aluminum hydroxide, or a saponin containing liposomal adjuvant.

[0104] In another exemplary aspect, the immunogenic composition includes trehalose, tris buffer, histidine buffer and polysorbate 80. In another exemplary aspect, the immunogenic composition includes trehalose, tris buffer, sodium phosphate buffer, potassium phosphate buffer and polysorbate 80. The pH of the buffer will generally be chosen to stabilize the active material of choice, and can be ascertainable by those in the art by known methods. Preferably, the pH of the buffer will be in the range of physiological pH. Thus, preferred pH ranges are from about 3 to about 8; more preferably, from about 6.0 to about 8.0; yet more preferably, from about 6.5 to about 7.5.

[0105] The adjuvant may comprise, for instance, a suitable concentration (e.g., about any of 800-5000 μg/mL) of an adjuvant. The immunogenic compositions may further comprise aluminum (e.g., aluminum hydroxide or aluminum phosphate), for example, aluminum hydroxide in Sodium Chloride may be used as the diluent to reconstitute the lyophilized formulation. WFI may be used to dilute the lyophilized vaccine for the unadjuvanted formulations. The final dosing solution may comprise, for instance, composition/vaccine, diluent and adjuvant.

[0106] In one aspect, the pharmaceutical composition includes one, two or more different adjuvants. Alternatively, in one aspect, the composition is administered to the mammal in the absence of an adjuvant. That is, the composition does not comprise an adjuvant.

[0107] In some aspects, the pharmaceutical composition further includes formaldehyde. For example, in a preferred aspect, a pharmaceutical composition that further includes formaldehyde has an immunogenic composition, wherein the mutant C. difficile toxin of the immunogenic composition has been contacted with a chemical crosslinking agent that includes formaldehyde. The amount of formaldehyde present in the pharmaceutical composition may vary from a minimum of about 0.001%, 0.002%, 0.003%, 0.004%, 0.005%, 0.006%, 0.007%, 0.008%, 0.009%, 0.010%, 0.013%, or 0.015%, to a maximum of about 0.020%, 0.019%, 0.018%, 0.017% 0.016%, 0.015%, 0.014%, 0.013%, 0.012% 0.011% or 0.010%. Any minimum value can be combined with any maximum value to define a suitable range. In one aspect, the pharmaceutical composition includes about 0.010% formaldehyde.

[0108] In some alternative aspects, the pharmaceutical compositions described herein do not include formaldehyde. For example, in a preferred aspect, a pharmaceutical composition that does not include formaldehyde has an immunogenic composition, wherein at least one amino acid of the mutant C. difficile toxin is chemically crosslinked by an agent that includes EDC. More preferably, in such an aspect, the mutant C. difficile toxin has not been contacted with a chemical crosslinking agent that includes formaldehyde. As another exemplary aspect, a pharmaceutical composition that is in a lyophilized form does not include formaldehyde.

[0109] Also provided herein are kits for administering the C. difficile antigens. In one aspect, one or more of C. difficile antigens may form part of and/or be provided as a kit for administration to a subject. Instructions for administering the C. difficile antigens may also be provided by the kit. Compositions comprising C. difficile antigens as described herein may be included in a kit (e.g., a vaccine kit). For example, the kit may comprise a first container containing a composition described herein in dried or lyophilized form and a second container containing an aqueous solution for reconstituting the composition. The kit may optionally include the device for administration of the reconstituted liquid form of the composition (e.g., hypodermic syringe, microneedle array) and/or instructions for use. The device for administration may be supplied pre-filled with an aqueous solution for reconstituting the composition.

[0110] The volume of each delivered dose of study drug (vaccine or placebo) may be about 0.5 mL. The volume of each delivered dose of the composition disclosed herein may be about 0.2, 0.3, 0.4, 0.5, 0.6, 0.7; 0.8, 0.9 or 1 mL. The volume of each delivered dose of the composition disclosed herein may be about 0.4, 0.5, 0.6 ml. The volume of each delivered dose of the composition disclosed herein may be about 0.5 mL. The volume of each delivered dose of the composition disclosed herein may be about 1 mL. Formulations may be administered by any suitable route (e.g., subcutaneously, intravenously, intramuscularly, intraperitoneally, intradermally, intranodally, intranasally, orally).

[0111] As referred to above, an immunological composition is typically one that comprises C. difficile antigen(s) and, upon administration to a host/subject (e.g., a human), induces or enhances an immune response directed against the antigen (e.g., C. difficile). Such responses may include the generation of antibodies (e.g., through the stimulation of B cells) or a T cell-based response (e.g., a cytolytic response), which may be protective and/or neutralizing. A protective or neutralizing immune response may be one that is detrimental to the infectious organism corresponding to the antigen (e.g., from which the antigen was derived) and beneficial to the host (e.g., by reducing or preventing infection). As used herein, protective or neutralizing antibodies and/or cellular responses may be reactive with the C. difficile antigen(s) described here, especially when administered in an effective amount and/or schedule. Those antibodies and/or cellular responses may reduce or inhibit the severity, time, and/or lethality of C. difficile infection when tested in animals. As shown in the examples, the immunogenic compositions comprising adjuvants described herein may be used to induce an immune response against C. difficile. An immunological composition that, upon administration to a host, results in a therapeutic (e.g., typically administered during an active infection) and/or protective (e.g., typically administered before or after an active infection) and/or neutralizing immune response, may be considered a vaccine.

### Adjuvants

[0112] The present invention further provides for immunogenic compositions comprising an adjuvant. An adjuvant is a substance that enhances the immune response when administered together with an immunogen or antigen. Antigens may act primarily as a delivery system, primarily as an immune modulator or have strong features of both. Suitable adjuvants include those suitable for use in mammals, including humans. Preferred adjuvants augment the intrinsic immune response to an immunogen without causing conformational changes in the immunogen that may affect the qualitative form of the immune response. Suitable adjuvants include MPL™ (3-O-deacylated monophosphoryl lipid A; Corixa, Hamilton, MT), which is described in U.S. Pat. No. 4,912,094, which is hereby incorporated by reference in its entirety, an aluminum hydroxide gel such as ALHYDROGEL™ (Brenntag Biosector, Denmark); aluminum salts (such as aluminum hydroxide, aluminum phosphate, aluminum sulfate), which may be used with or without an immunostimulating agent such as MPL or 3-DMP, QS-21, polymeric or monomeric amino acids such as polyglutamic acid or polylysine.

[0113] Suitable adjuvants further include an immunostimulatory oligonucleotide such as a CpG oligonucleotide (see, e.g., WO 1998/040100, WO2010/067262 and further described herein), a saponin containing liposomal adjuvant (further described herein), or a saponin and an immunostimulatory oligonucleotide, such as a CpG oligonucleotide (see, e.g., WO 00/062800), which are incorporated by reference herein in their entireties.

[0114] Other adjuvants include RC-529, GM-CSF and Complete Freund's Adjuvant (CFA) and Incomplete Freund's Adjuvant (IFA). Yet another class of adjuvants is glycolipid analogues including N-glycosylamides, N-glycosylureas and N-glycosylcarbamates, each of which is substituted in the sugar residue by an amino acid.

[0115] An effective amount of an adjuvant, such as those described herein, refers to the amount necessary or sufficient to realize a desired biologic effect. For example, an effective amount of a adjuvant administered with an antigen for inducing an antigen-specific immune response is that amount necessary to induce an immune response in response to an antigen upon exposure to the antigen. Combined with the teachings provided herein, by choosing among the various adjuvants and weighing factors such as potency, relative bioavailability, subject body weight, severity of adverse side-effects and preferred mode of administration, an effective prophylactic or therapeutic treatment regimen can be planned which does not cause substantial toxicity and yet is effective to treat the particular subject. The effective amount for any particular application can vary depending on such factors as the disease or condition being treated, the particular adjuvant being administered, the size of the subject, or the severity of the disease or condition.

### CpG Adjuvants

[0116] In some aspects, the immunogenic compositions described herein comprise C. difficile toxoids, TxdA and TxdB, and an immunostimulatory oligonucleotide adjuvant.

[0117] In a preferred aspect, the immunostimulatory oligonucleotide adjuvant is a CpG oligonucleotide, and most preferably a CpG oligodeoxynucleotides (CpG ODN), and accordingly these terms are used interchangeably unless otherwise indicated. A “CpG” refers to cytosine-phosphoguanosine (CpG) motif-containing oligodeoxynucleotide (CpG ODN), which is a toll-like receptor 9 (TLR9) agonist.

[0118] A CpG oligonucleotide is a short nucleic acid molecule containing a cytosine followed by a guanine linked by a phosphate bond in which the pyrimidine ring of the cytosine is unmethylated. A CpG motif is a pattern of bases that include an unmethylated central CpG surrounded by at least one base flanking (on the 3′ and the 5′ side of) the central CpG. CpG oligonucleotides include both D and K oligonucleotides. The entire CpG oligonucleotide may be unmethylated or portions may be unmethylated. Examples of CpG oligonucleotides useful in the methods provided by the present disclosure include those disclosed in U.S. Pat. Nos. 6,194,388, 6,207,646, 6,214,806, 628,371, 6,239,116, and 6,339,068.

[0119] CpG oligonucleotides may encompass various chemical modifications and substitutions, in comparison to natural RNA and DNA, involving a phosphodiester internucleoside bridge, a beta-D-ribose (deoxyhbose) unit and/or a natural nucleoside base (adenine, guanine, cytosine, thymine, uracil). Examples of chemical modifications are known to the skilled person and are described, for example in Uhlmann E. et al. (1990), Chem. Rev. 90:543; “Protocols for Oligonucleotides and Analogs”, Synthesis and Properties and Synthesis and Analytical Techniques, S. Agrawal, Ed., Humana Press, Totowa, USA 1993; Crooke, S T. et al. (1996) Annu. Rev. Pharmacol. Toxicol. 36:107-129; and Hunziker J. et al., (1995), Mod. Synth. Methods 7:331-417. Specifically, a CpG oligonucleotide can contain a modified cytosine. A modified cytosine is a naturally occurring or non-naturally occurring pyrimidine base analog of cytosine which can replace this base without impairing the immunostimulatory activity of the oligonucleotide. Modified cytosines include but are not limited to 5-substituted cytosines (e.g. 5-methyl-cytosine, 5-fluorocytosine, 5-chloro-cytosine, 5-bromo-cytosine, 5-iodo-cytosine, 5-hydroxy-cytosine, 5-hydroxymethyl-cytosine, 5-difluoromethyl-cytosine, and unsubstituted or substituted 5-alkynyl-cytosine), 6-substituted cytosines, N4-substituted cytosines (e.g. N4-ethyl-cytosine), 5-aza-cytosine, 2-mercapto-cytosine, isocytosine, pseudo-isocytosine, cytosine analogs with condensed ring systems (e.g. N,N′-propylene cytosine or phenoxazine), and uracil and its derivatives (e.g. 5-fluoro-uracil, 5-bromo-uracil, 5-bromovinyl-uracil, 4-thio-uracil, 5-hydroxy-uracil, 5-propynyl-uracil). Some of the preferred cytosines include 5-methyl-cytosine, 5-fluoro-cytosine, 5-hydroxy-cytosine, 5-hydroxymethyl-cytosine, and N4-ethyl-cytosine.

[0120] A CpG oligonucleotide can also contain a modified guanine. A modified guanine is a naturally occurring or non-naturally occurring purine base analog of guanine which can replace this base without impairing the immunostimulatory activity of the oligonucleotide. Modified guanines include but are not limited to 7-deeazaguanine, 7-deaza-7-substituted guanine, hypoxanthine, N2-substituted guanines (e.g. N2-methyl-guanine), 5-amino-3-methyl-3H,6H-thiazolo[4,5-d]pyhmidine-2,7-dione, 2,6-diaminopuhne, 2-aminopuhne, purine, indole, adenine, substituted adenines (e.g. N6-methyl-adenine, 8-oxo-adenine), 8-substituted guanine (e.g. 8-hydroxyguanine and 8-bromoguanine), and 6-thioguanine. In some aspects of the disclosure, the guanine base is substituted by a universal base (e.g. 4-methyl-indole, 5-nitro-indole, and K-base), an aromatic ring system (e.g. benzimidazole or dichloro-benzimidazole, 1-methyl-1H-[1,2,4]triazole-3-carboxylic acid amide) or a hydrogen atom.

[0121] In certain aspects, the CpG oligonucleotides include modified backbones. It has been demonstrated that modification of the nucleic acid backbone provides enhanced activity of nucleic acids when administered in vivo. Secondary structures, such as stem loops, can stabilize nucleic acids against degradation. Alternatively, nucleic acid stabilization can be accomplished via phosphate backbone modifications. A preferred stabilized nucleic acid has at least a partial phosphorothioate modified backbone. Phosphorothioates may be synthesized using automated techniques employing either phosphoramidate or H-phosphonate chemistries. Aryl- and alkyl-phosphonates can be made, e.g. as described in U.S. Pat. No. 4,469,863; and alkylphosphotriesters (in which the charged oxygen moiety is alkylated as described in U.S. Pat. No. 5,023,243 and European Patent No. 092,574) can be prepared by automated solid phase synthesis using commercially available reagents. Methods for making other DNA backbone modifications and substitutions have been described (Uhlmann, E. and Peyman, A. (1990) Chem. Rev. 90:544; Goodchild, J. (1990) Bioconjugate Chem. 1:165). 2′-O-methyl nucleic acids with CpG motifs also cause immune activation, as do ethoxy-modified CpG nucleic acids. In fact, no backbone modifications have been found that completely abolish the CpG effect, although it is greatly reduced by replacing the C with a 5-methyl C. Constructs having phosphorothioate linkages provide maximal activity and protect the nucleic acid from degradation by intracellular exo- and endo-nucleases.

[0122] In one aspect of the invention the oligonucleotide includes at least one phosphorothioate linkage. In another aspect all internucleotide linkages of the oligonucleotide are phosphorothioate linkages. In another aspect the oligonucleotide includes at least one phosphodiester-like linkage. In another aspect the phosphodiester-like linkage is a phosphodiester linkage. In another aspect a lipophilic group is conjugated to the oligonucleotide. In one aspect the lipophilic group is cholesterol.

[0123] In an embodiment, all the internucleotide linkage of the CpG oligonucleotides disclosed herein are phosphodiester bonds (“soft” oligonucleotides, as described in WO 2007/026190). In another embodiment, CpG oligonucleotides of the invention are rendered resistant to degradation (e.g., are stabilized). In an aspect, all the internucleotide linkage of the CpG oligonucleotides disclosed herein are phosphodiester bonds (“soft” oligonucleotides, as described in WO 2007/026190). In another aspect, CpG oligonucleotides of the invention are rendered resistant to degradation (e.g., are stabilized).

[0124] The immunostimulatory oligonucleotides may have a chimeric backbone, which have combinations of phosphodiester and phosphorothioate linkages. For purposes of the instant invention, a chimeric backbone refers to a partially stabilized backbone, wherein at least one internucleotide linkage is phosphodiester or phosphodiester-like, and wherein at least one other internucleotide linkage is a stabilized internucleotide linkage, wherein the at least one phosphodiester or phosphodiester-like linkage and the at least one stabilized linkage are different. When the phosphodiester linkage is preferentially located within the CpG motif such molecules are called “semi-soft” as described in WO 2007/026190.

[0125] Other modified oligonucleotides include phosphodiester modified oligonucleotides, combinations of phosphodiester and phosphorothioate oligonucleotides, methylphosphonate, methyl phosphorothioate, phosphorordithioate, p-ethoxy, and combinations thereof. Each of these combinations and their particular effects on immune cells is discussed in more detail with respect to CpG nucleic acids in PCT Publication Nos. WO 96/02555 and WO 98/18810 and in U.S. Pat. Nos. 6,194,388 and 6,239,116.

[0126] Mixed backbone modified ODN may be synthesized as described in WO 2007/026190. In an aspect, the CpG oligonucleotides disclosed herein may comprise substitutions or modifications, such as in the bases and/or sugars as described in WO 2007/026190.

[0127] In some aspects of the invention, CpG-containing nucleic acids might be mixed with immunogenic carriers according to methods known to those skilled in the art (see, e.g., WO 03/024480).

[0128] The CpG oligonucleotides may have one or two accessible 5′ ends. It is possible to create modified oligonucleotides having two such 5 ends, for instance, by attaching two oligonucleotides through a 3′-3′ linkage to generate an oligonucleotide having one or two accessible 5′ ends. The 3′-3′-linkage may be a phosphodiester, phosphorothioate or any other modified internucleoside bridge. Methods for accomplishing such linkages are known in the art. For instance, such linkages have been described in Seliger, H. et al., Oligonucleotide analogs with terminal 3′-3′- and 5′-5′-internucleotidic linkages as antisense inhibitors of viral gene expression, Nucleosides and Nucleotides (1991), 10(1-3), 469-77 and Jiang, et al., Pseudo-cyclic oligonucleotides: in vitro and in vivo properties, Bioorganic and Medicinal Chemistry (1999), 7(12), 2727-2735.

[0129] Additionally, 3′-3′-linked oligonucleotides where the linkage between the 3′-terminal nucleosides is not a phosphodiester, phosphorothioate or other modified bridge, can be prepared using an additional spacer, such as tri- or tetra-ethyleneglycol phosphate moiety (Durand, M. et al., Triple-helix formation by an oligonucleotide containing one (dA)12 and two (dT)12 sequences bridged by two hexaethylene glycol chains, Biochemistry (1992), 31 (38), 9197-204, U.S. Pat. Nos. 5,658,738 and 5,668,265). Alternatively, the non-nucleotidic linker may be derived from ethanediol, propanediol, or from an abasic deoxyhbose (dSpacer) unit (Fontanel, Marie Laurence et al., Nucleic Acids Research (1994), 22(11), 2022-7) using standard phosphoramidite chemistry. The non-nucleotidic linkers can be incorporated once or multiple times, or combined with each other allowing for any desirable distance between the 3′-ends of the two oligonucleotides to be linked.

[0130] A phosphodiester internucleoside bridge located at the 3′ and/or the 5 end of a nucleoside can be replaced by a modified internucleoside bridge, wherein the modified internucleoside bridge is for example selected from phosphorothioate, phosphorodithioate, NR₁R₂-phosphoramidate, boranophosphate, a-hydroxybenzyl phosphonate, phosphate-(C₁-C₂₁)—O-alkyl ester, phosphate-[(C₆-C₂₁)aryl-(C₁-C₂₁)—O-alkyl]ester, (C₁-C₃)alkylphosphonate and/or (C₆-C₁₂)arylphosphonate bridges, (C₇-C₁₂)-a-hydroxymethyl-aryl (e.g. disclosed in PCT Publication No. WO 95/01363), wherein (C₆-C₁₂)aryl, (C₆-C₂₀)aryl and (C₆-C₁₄)aryl are optionally substituted by halogen, alkyl, alkoxy, nitro, cyano, and where R₁ and R₂ are, independently of each other, hydrogen, (C₁-C₁₈)-alkyl, (C₆-C₂₀)-aryl, (C₆-C₁₄)-aryl, (C₁-C₃)-alkyl, preferably hydrogen, (C₁-C₃)-alkyl, preferably (C₁-C₄)-alkyl and/or methoxyethyl, or R₁ and R₂ form, together with the nitrogen atom carrying them, a 5 to 6-membered heterocyclic ring which can additionally contain a further heteroatom selected from the group O, S and N.

[0131] The replacement of a phosphodiester bridge located at the 3′ and/or the 5′ end of a nucleoside by a dephospho bridge (dephospho bridges are described, for example, in Uhlmann E. and Peyman A. in “Methods in Molecular Biology”, Vol. 20, “Protocols for Oligonucleotides and Analogs”, S. Agrawal, Ed., Humana Press, Totowa 1993, Chapter 16, pp. 355 ff), wherein a dephospho bridge is for example selected from the dephospho bridges formacetal, 3′-thioformacetal, methylhydroxylamine, oxime, methylenedimethyl-hydrazo, dimethylenesulfone and/or silyl groups.

[0132] Different classes of CpG immunostimulatory oligonucleotides have been identified and are described in greater detail in WO 2010/125480. Compositions and methods of the present invention include the use of these different classes of CpG immunostimulatory oligonucleotides. In aspects of the invention, the immunostimulatory oligonucleotides include, but are not limited to, oligonucleotides that are A-Class, B-Class, C-Class, T-Class, P-Class or any Class with an E modification.

[0133] In an aspect of the present invention, the immunogenic compositions as disclosed herein comprise an A class CpG ODN. In some aspects, the A class CpG oligonucleotide of the present invention comprises the nucleic acid sequence: 5′ GGGGACGACGTCGTGGGGGGG 3′ (SEQ ID NO: 847).

[0134] In any of the A class CpG oligonucleotide sequences, all of the linkages may be all phosphorothioate bonds. In another aspect, one or more of the linkages may be phosphodiester, preferably between the “C” and the “G” of the CpG motif making a semi-soft CpG oligonucleotide. In any of these sequences, an ethyl-uridine or a halogen may substitute for the 5′ T; examples of halogen substitutions include but are not limited to bromo-uridine or iodo-uridine substitutions.

[0135] In a preferred aspect of the present invention, the immunogenic compositions as disclosed herein comprise a B class CpG ODN that preferentially activate B cells. In one aspect, the CpG oligonucleotide of the present invention is a B class CpG oligonucleotide represented by at least the formula: 5′ X₁X₂CGX₃X₄ 3′, wherein X1, X2, X3, and X4 are nucleotides. In one embodiment, X₂ is adenine, guanine, or thymine. In another embodiment, X₃ is cytosine, adenine, or thymine. The B class CpG oligonucleotide sequences of the present invention may include those described in WO 96/02555, WO 98/18810 and U.S. Pat. Nos. 6,194,388; 6,207,646; 6,214,806; 6,218,371; 6,239,116 and 6,339,068.

[0136] In some aspects, the B class CpG oligonucleotides of the present invention may include, but are not limited to, the following nucleic acid sequences:

(SEQ ID NO: 48; CpG 24555)
5′ TCGTCGTTTTTCGGTGCTTTT 3′,
(SEQ ID NO: 841; CpG 1018)
5′ TGACTGTGAACGTTCGAGATGA 3′;
(SEQ ID NO: 842; CpG 7909)
5′ TCGTCGTTTTGTCGTTTTGTCGTT 3′;
(SEQ ID NO: 843; CpG 10103)
5′ TCGTCGTTTTTCGGTCGTTTT 3′;
(SEQ ID NO: 844; CpG 1826)
5′ TCCATGACGTTCCTGACGTT 3′;
(SEQ ID NO: 845)
5′ TCGTCGTTTCGTCGTTTTGTCGTT 3′;
and
(SEQ ID NO: 846)
5′ TCGTCGTTTTGTCGTTTTTTTCGA 3′.

[0137] In any of the B class CpG oligonucleotide sequences, all of the linkages may be all phosphorothioate bonds. In another aspect, in any of these sequences, one or more of the linkages may be phosphodiester, preferably between the “C” and the “G” of the CpG motif making a semi-soft CpG oligonucleotide. In any of these sequences, an ethyl-uridine or a halogen may substitute for the 5′ T; examples of halogen substitutions include but are not limited to bromo-uridine or iodo-uridine substitutions.

[0138] In a preferred aspect of the invention, the CpG ODN comprises the nucleic acid sequence 5′ T*C*G*T*C*G*T*T*T*T*T*C*G*G*T*G*C*T*T*T*T 3′ (SEQ ID NO: 48) wherein * indicates a phosphorothioate linkage. The CpG ODN of this sequence is known as CpG 24555, which is described in WO2010/067262. CpG 24555 is a TLR9 agonist with potent Th1 cell activity that stimulates strong B-cell and NK-cell activation.

[0139] In an aspect of the present invention, the immunogenic compositions as disclosed herein comprise a C class CpG oligonucleotide. In some aspects, the C class CpG oligonucleotides of the present invention may include, but are not limited to, the following nucleic acid sequences:

(SEQ ID NO: 848)
5′ TCGCGTCGTTCGGCGCGCGCCG 3′;
(SEQ ID NO: 849)
5′ TCGTCGACGTTCGGCGCGCGCCG 3′;
(SEQ ID NO: 850)
5′ TCGGACGTTCGGCGCGCGCCG 3′;
(SEQ ID NO: 851)
5′ TCGGACGTTCGGCGCGCCG 3′;
(SEQ ID NO: 852)
5′ TCGCGTCGTTCGGCGCGCCG 3′;
(SEQ ID NO: 853)
5′ TCGACGTTCGGCGCGCGCCG 3′;
(SEQ ID NO: 854)
5′ TCGACGTTCGGCGCGCCG 3′;
(SEQ ID NO: 855)
5′ TCGCGTCGTTCGGCGCCG 3′;
(SEQ ID NO: 856)
5′ TCGCGACGTTCGGCGCGCGCCG 3′;
(SEQ ID NO: 857)
5′ TCGTCGTTTTCGGCGCGCGCCG 3′;
(SEQ ID NO: 858)
5′ TCGTCGTTTTCGGCGGCCGCCG 3′;
(SEQ ID NO: 859)
5′ TCGTCGTTTTACGGCGCCGTGCCG 3′;
and
(SEQ ID NO: 860)
5′ TCGTCGTTTTCGGCGCGCGCCGT 3′

[0140] In any of the C class CpG oligonucleotide sequences, all of the linkages may be all phosphorothioate bonds. In another embodiment, in any of these sequences, one or more of the linkages may be phosphodiester, preferably between the “C” and the “G” of the CpG motif making a semi-soft CpG oligonucleotide. In any of these sequences, an ethyl-uridine or a halogen may substitute for the 5′ T; examples of halogen substitutions include but are not limited to bromo-uridine or iodo-uridine substitutions.

[0141] In an aspect of the present invention, the immunogenic compositions as disclosed herein comprise a P class CpG Oligonucleotide. In some aspects, the CpG oligonucleotides of the present invention may include a P class CpG oligonucleotide containing a 5′ TLR activation domain and at least two palindromic regions, one palindromic region being a 5′ palindromic region of at least 6 nucleotides in length and connected to a 3′ palindromic region of at least 8 nucleotides in length either directly or through a spacer, wherein the oligonucleotide includes at least one YpR dinucleotide. In one aspect, the P class CpG oligonucleotide includes at least one unmethylated CpG dinucleotide. In another aspect, the TLR activation domain is TCG, TTCG, TTTCG, TYpR, TTYpR, TTTYpR, UCG, UUCG, UUUCG, TTT, orTTTT. In yet another aspect, the TLR activation domain is within the 5′ palindromic region. In another aspect, the TLR activation domain is immediately 5′ to the 5′ palindromic region. In some aspects, the P class CpG oligonucleotides of the invention comprise the nucleic acid sequence: 5′ TCGTCGACGATCGGCGCGCGCCG 3′ (SEQ ID NO: 861).

[0142] In any of the P class CpG oligonucleotide sequences, all of the linkages may be all phosphorothioate bonds. In another aspect, one or more of the linkages may be phosphodiester, preferably between the “C” and the “G” of the CpG motif making a semi-soft CpG oligonucleotide. In any of these sequences, an ethyl-uridine or a halogen may substitute for the 5′ T; examples of halogen substitutions include but are not limited to bromo-uridine or iodo-uridine substitutions.

[0143] The immunogenic compositions comprising a CpG adjuvant may further comprise a buffer. Exemplary buffers include phosphate (such as potassium phosphate, sodium phosphate); acetate (such as sodium acetate); succinate (such as sodium succinate); glycine; histidine; carbonate, Tris (tris(hydroxymethyl)aminomethane), and/or bicarbonate (such as ammonium bicarbonate) buffers.

[0144] In a preferred aspect, the CpG adjuvant may include a histidine buffer. Preferred amounts of histidine buffer include a concentration from about 1 mM, 5 mM, 6 mM, 7 mM, 8 mM, 9 mM, 10 mM, 11 mM, 12 mM, 13 mM, 14 mM, 15 mM, 16 mM, 17 mM, 18 mM, 19 mM, 20 mM, 50 mM, or 100 mM. In one aspect, the CpG adjuvant includes histidine buffer at a concentration of about 5 mM to about 15 mM histidine buffer. In one aspect, the CpG adjuvant includes histidine buffer at a concentration of about 8 mM to about 12 mM. In a preferred aspect, the CpG adjuvant includes histidine buffer at a concentration of about 10 mM.

[0145] In another aspect, the CpG adjuvant may include a phosphate buffer. Preferred amounts of phosphate buffer include a concentration from about 1 mM, 5 mM, 6 mM, 7 mM, 8 mM, 9 mM, 10 mM, 11 mM, 12 mM, 13 mM, 14 mM, 15 mM, 16 mM, 17 mM, 18 mM, 19 mM, 20 mM, 50 mM, or 100 mM. In one aspect, the CpG adjuvant includes phosphate buffer at a concentration of about 10 mM to about 25 mM. In a preferred aspect, the CpG adjuvant includes phosphate buffer at a concentration of about 20 mM phosphate.

[0146] The CpG adjuvant may further comprise a salt. Exemplary salts include magnesium chloride, potassium chloride, sodium chloride and a combination thereof.

[0147] In a preferred aspect, the CpG adjuvant may include sodium chloride (NaCl). Preferred amounts of sodium chloride include a concentration from a minimum of about 10 mM, 20 mM, 25 mM, 30 mM, 40 mM, 50 mM, 60 mM, 75 mM, 80 mM, 90 mM, 100 mM, 125 mM, 150 mM, 175 mM, 200 mM, 225 mM, 250 mM, 270 mM, or 300 mM. In a preferred aspect, the CpG adjuvant includes sodium chloride at a concentration of about 20 to about 100 mM. In a preferred aspect, the CpG adjuvant includes sodium chloride at a concentration of about 40 to about 200 mM. In a preferred aspect, the CpG adjuvant includes sodium chloride at a concentration of about 50 mM. In another preferred aspect, the CpG adjuvant includes sodium chloride at a concentration of about 60 mM.

[0148] Doses of the CpG oligonucleotides describe herein may range from about 0.1 μg to 50 mg per dose depending on the application. In some aspects, the dose may range from about 10 μg to 10 mg per administration. In some aspects, the immunogenic composition comprises CpG alone. In some aspects, the immunogenic composition comprises CpG and an additional adjuvant.

[0149] In one aspect, the immunogenic composition comprises about 0.1 to 5 mg/mL or higher of CpG, including at least about 0.1 mg/mL, at least about 0.5 mg/mL, at least about 1.0 mg/mL, at least about 1.1 mg/mL, at least about 1.2 mg/mL, at least about 1.3 mg/mL, at least about 1.4 mg/mL, at least about 1.5 mg/mL, at least about 1.6 mg/mL, at least about 1.7 mg/mL, at least about 1.8 mg/mL, at least about 1.9 mg/mL, at least about 2.0 mg/mL, at least about 2.1 mg/mL, at least about 2.2 mg/mL, at least about 2.3 mg/mL, at least about 2.4 mg/mL, at least about 2.5 mg/mL, at least about 3.0 mg/mL, at least about 3.1 mg/mL, at least about 3.2 mg/mL, at least about 3.3 mg/mL, at least about 3.4 mg/mL, at least about 3.5 mg/mL, at least about 3.6 mg/mL, at least about 3.7 mg/mL, at least about 3.8 mg/mL, at least about 3.9 mg/mL, at least about 4.0 mg/mL, at least about 4.5 mg/mL, at least about 5.0 mg/mL or higher of CpG.

[0150] In one aspect, the immunogenic composition comprises about 0.1 to about 1.0 mg/mL of CpG. In one preferred aspect, the immunogenic composition comprises about 0.5 mg/mL of CpG. In one aspect, the immunogenic composition comprises about 0.1 to about 1.0 mg/mL of CpG 24555. In one preferred aspect, the immunogenic composition comprises about 0.5 mg/mL of CpG 24555.

[0151] In one aspect, the immunogenic composition comprises about 0.5 to about 1.5 mg/mL of CpG. In one preferred aspect, the immunogenic composition comprises about 1.0 mg/mL of CpG. In one aspect, the immunogenic composition comprises about 0.5 to about 1.5 mg/mL of CpG 24555. In one preferred aspect, the immunogenic composition comprises about 1.0 mg/mL of CpG 24555.

[0152] In one aspect, the immunogenic composition comprises about 0.8 to about 1.8 mg/mL of CpG. In one preferred aspect, the immunogenic composition comprises about 1.2 mg/mL of CpG. In one aspect, the immunogenic composition comprises about 0.8 to about 1.8 mg/mL of CpG 24555. In one preferred aspect, the immunogenic composition comprises about 1.2 mg/mL of CpG 24555.

[0153] In one aspect, the immunogenic composition comprises about 3.0 to about 4.0 mg/mL of CpG. In one preferred aspect, the immunogenic composition comprises about 3.6 mg/mL of CpG. In one aspect, the immunogenic composition comprises about 3.0 to about 4.0 mg/mL of CpG 24555. In one preferred aspect, the immunogenic composition comprises about 3.6 mg/mL of CpG 24555.

[0154] In a preferred aspect, an immunogenic composition comprises lyophilized C. difficile toxoid A and toxoid B, reconstituted with a CpG adjuvant comprising about 3.6 mg/mL of CpG 24555 (high-dose CpG). In a preferred aspect, an immunogenic composition comprises lyophilized C. difficile toxoids A and B, reconstituted with a CpG adjuvant comprising about 3.6 mg/mL of CpG 24555 in 10 mM histidine, 60 mM NaCl at pH 6.5 (high-dose CpG). In a preferred aspect, the composition is administered at a dose volume of 0.5 mL.

[0155] In a preferred aspect, an immunogenic composition comprises lyophilized C. difficile toxoid A and toxoid B at 0.4 mg/mL total (200 μg/mL of toxoid A and 200 μg/mL of toxoid B), reconstituted with a CpG adjuvant comprising about 3.6 mg/mL of CpG 24555 (high-dose CpG). In a preferred aspect, an immunogenic composition comprises lyophilized C. difficile toxoid A and toxoid B at 0.4 mg/mL total (200 μg/mL of toxoid A and 200 μg/mL of toxoid B), reconstituted with a CpG adjuvant comprising about 3.6 mg/mL of CpG 24555 in 10 mM histidine, 60 mM NaCl at pH 6.5 (high-dose CpG). In a preferred aspect, the composition is administered at a dose volume of 0.5 mL.

[0156] The immunogenic compositions comprising CpG adjuvants disclosed herein may further comprise an additional adjuvant.

[0157] In an aspect, the immunogenic compositions comprising CpG adjuvants disclosed herein may further comprise aluminum salts (alum) (e.g., aluminum phosphate, aluminum sulfate or aluminum hydroxide). In one aspect, the immunogenic compositions comprising CpG adjuvants further comprise aluminum phosphate or aluminum hydroxide as adjuvant. In a preferred aspect, the immunogenic compositions comprising CpG adjuvants further comprise aluminum hydroxide (Al(OH)₃).

[0158] In one aspect, the immunogenic compositions comprising CpG may further comprise about 0.1 to 5 mg/mL or higher of Al(OH)₃, including at least about 0.1 mg/mL, at least about 0.5 mg/mL, at least about 1.0 mg/mL, at least about 1.1 mg/mL, at least about 1.2 mg/mL, at least about 1.3 mg/mL, at least about 1.4 mg/mL, at least about 1.5 mg/mL, at least about 1.6 mg/mL, at least about 1.7 mg/mL, at least about 1.8 mg/mL, at least about 1.9 mg/mL, at least about 2.0 mg/mL, at least about 2.1 mg/mL, at least about 2.2 mg/mL, at least about 2.3 mg/mL, at least about 2.4 mg/mL, at least about 2.5 mg/mL, at least about 3.0 mg/mL, at least about 3.1 mg/mL, at least about 3.2 mg/mL, at least about 3.3 mg/mL, at least about 3.4 mg/mL, at least about 3.5 mg/mL, at least about 3.6 mg/mL, at least about 3.7 mg/mL, at least about 3.8 mg/mL, at least about 3.9 mg/mL, at least about 4.0 mg/mL, at least about 4.5 mg/mL, at least about 5.0 mg/mL or higher of Al(OH)₃.

[0159] In one aspect, the immunogenic compositions comprising CpG may further comprise about 0.5 to about 2.5 mg/mL of Al(OH)₃. In one aspect, the immunogenic compositions comprising CpG may further comprise about 1.0 to about 2.5 mg/mL of Al(OH)₃. In one aspect, the immunogenic compositions comprising CpG may further comprise about 1.5 to about 2.5 mg/mL of Al(OH)₃. In one preferred aspect, the immunogenic compositions comprising CpG may further comprise about 1.0 mg/mL of Al(OH)₃. In one preferred aspect, the immunogenic compositions comprising CpG may further comprise about 1.5 mg/mL of Al(OH)₃. In one preferred aspect, the immunogenic compositions comprising CpG may further comprise about 1.7 mg/mL of Al(OH)₃. In one preferred aspect, the immunogenic compositions comprising CpG may further comprise about 1.8 mg/mL of Al(OH)₃. In one preferred aspect, the immunogenic compositions comprising CpG adjuvants further comprise about 2.0 mg/mL of Al(OH)₃. In one preferred aspect, the immunogenic compositions comprising CpG adjuvants further comprise about 2.5 mg/mL of Al(OH)₃.

[0160] In one aspect, the immunogenic compositions comprise about 0.5 mg/mL or higher of CpG (e.g. CpG 24555) and 1.0 mg/mL or higher of Al(OH)₃.

[0161] In one aspect, the immunogenic compositions comprise about 0.5/1.0, 0.5/1.5, 0.5/1.6, 0.5/1.7, 0.5/1.8, 0.5/1.9, 0.5/2.0, 0.5/2.5 mg/mL or higher of CpG/Al(OH)₃. In one aspect, the immunogenic compositions comprise about 1.0/1.0, 1.0/1.5, 1.0/1.6, 1.0/1.7, 1.0/1.8, 1.0/1.9, 1.0/2.0, 1.0/2.5 mg/mL or higher of CpG/Al(OH)₃. In one aspect, the immunogenic compositions comprise about 1.1/1.0, 1.1/1.5, 1.1/1.6, 1.1/1.7, 1.1/1.8, 1.1/1.9, 1.1/2.0, 1.1/2.5 mg/mL or higher of CpG/Al(OH)₃. In one aspect, the immunogenic compositions comprise about 1.2/1.0, 1.2/1.5, 1.2/1.6, 1.2/1.7, 1.2/1.8, 1.2/1.9, 1.2/2.0, 1.2/2.5 mg/mL or higher of CpG/Al(OH)₃. In one aspect, the immunogenic compositions comprise about 1.3/1.0, 1.3/1.5, 1.3/1.6, 1.3/1.7, 1.3/1.8, 1.3/1.9, 1.3/2.0, 1.3/2.5 mg/mL or higher of CpG/Al(OH)₃. In one aspect, the immunogenic compositions comprise about 1.4/1.0, 1.4/1.5, 1.4/1.6, 1.4/1.7, 1.4/1.8, 1.4/1.9, 1.4/2.0, 1.4/2.5 mg/mL or higher of CpG/Al(OH)₃. In one aspect, the immunogenic compositions comprise about 1.5/1.0, 1.5/1.5, 1.5/1.6, 1.5/1.7, 1.5/1.8, 1.5/1.9, 1.5/2.0, 1.5/2.5 mg/mL or higher of CpG/Al(OH)₃. In one aspect, the immunogenic compositions comprise about 1.6/1.0, 1.6/1.5, 1.6/1.6, 1.6/1.7, 1.6/1.8, 1.6/1.9, 1.6/2.0, 1.6/2.5 mg/mL or higher of CpG/Al(OH)₃. In one aspect, the immunogenic compositions comprise about 1.7/1.0, 1.7/1.5, 1.7/1.6, 1.7/1.7, 1.7/1.8, 1.7/1.9, 1.7/2.0, 1.7/2.5 mg/mL or higher of CpG/Al(OH)₃. In one aspect, the immunogenic compositions comprise about 1.8/1.0, 1.8/1.5, 1.8/1.6, 1.8/1.7, 1.8/1.8, 1.8/1.9, 1.8/2.0, 1.8/2.5 mg/mL or higher of CpG/Al(OH)₃. In one aspect, the immunogenic compositions comprise about 1.9/1.0, 1.9/1.5, 1.9/1.6, 1.9/1.7, 1.9/1.8, 1.9/1.9, 1.9/2.0, 1.9/2.5 mg/mL or higher of CpG/Al(OH)₃. In one aspect, the immunogenic compositions comprise about 2.0/1.0, 2.0/1.5, 2.0/1.6, 2.0/1.7, 2.0/1.8, 2.0/1.9, 2.0/2.0, 2.0/2.5 mg/mL or higher of CpG/Al(OH)₃. In one aspect, the immunogenic compositions comprise about 2.1/1.0, 2.1/1.5, 2.1/1.6, 2.1/1.7, 2.1/1.8, 2.1/1.9, 2.1/2.0, 2.1/2.5 mg/mL or higher of CpG/Al(OH)₃. In one aspect, the immunogenic compositions comprise about 2.2/1.0, 2.2/1.5, 2.2/1.6, 2.2/1.7, 2.2/1.8, 2.2/1.9, 2.2/2.0, 2.2/2.5 mg/mL or higher of CpG/Al(OH)₃. In one aspect, the immunogenic compositions comprise about 2.3/1.0, 2.3/1.5, 2.3/1.6, 2.3/1.7, 2.3/1.8, 2.3/1.9, 2.3/2.0, 2.3/2.5 mg/mL or higher of CpG/Al(OH)₃. In one aspect, the immunogenic compositions comprise about 2.4/1.0, 2.4/1.5, 2.4/1.6, 2.4/1.7, 2.4/1.8, 2.4/1.9, 2.4/2.0, 2.4/2.5 mg/mL or higher of CpG/Al(OH)₃. In one aspect, the immunogenic compositions comprise about 2.5/1.0, 2.5/1.5, 2.5/1.6, 2.5/1.7, 2.5/1.8, 2.5/1.9, 2.5/2.0, 2.5/2.5 mg/mL or higher of CpG/Al(OH)₃.

[0162] In a preferred aspect, an immunogenic composition comprises lyophilized C. difficile toxoid A and toxoid B, reconstituted with a CpG adjuvant comprising about 1.0 mg/mL of CpG 24555 and about 1.5 mg/mL of Al(OH)₃ (low-dose CpG). In a preferred aspect, an immunogenic composition comprises lyophilized C. difficile toxoid A and toxoid B, reconstituted with a CpG adjuvant comprising about 1.0 mg/mL of CpG 24555 and about 1.5 mg/mL of Al(OH)₃ in 10 mM histidine, 50 mM NaCl at pH 6.5 (low-dose adjuvant). In a preferred aspect, the composition is administered at a dose volume of 0.5 mL.

[0163] In a preferred aspect, an immunogenic composition comprises lyophilized C. difficile toxoid A and toxoid B at 0.4 mg/mL total (200 μg/mL of toxoid A and 200 μg/mL of toxoid B), reconstituted with about 1.0 mg/mL of CpG 24555 and about 1.5 mg/mL of Al(OH)₃ (low-dose adjuvant). In a preferred aspect, an immunogenic composition comprises lyophilized C. difficile toxoid A and toxoid B total (200 μg/mL of toxoid A and 200 μg/mL of toxoid B), reconstituted with about 1.0 mg/mL of CpG 24555 and about 1.5 mg/mL of Al(OH)₃ in 10 mM histidine, 50 mM NaCl at pH 6.5 (low-dose adjuvant). In a preferred aspect, the composition is administered at a dose volume of 0.5 mL.

[0164] In one aspect, the immunogenic compositions comprise about 3.0/1.0, 3.0/1.5, 3.0/1.6, 3.0/1.7, 3.0/1.8, 3.0/1.9, 3.0/2.0, 3.0/2.5 mg/mL or higher of CpG/Al(OH)₃. In one aspect, the immunogenic compositions comprise about 3.1/1.0, 3.1/1.5, 3.1/1.6, 3.1/1.7, 3.1/1.8, 3.1/1.9, 3.1/2.0, 3.1/2.5 mg/mL or higher of CpG/Al(OH)₃. In one aspect, the immunogenic compositions comprise about 3.2/1.0, 3.2/1.5, 3.2/1.6, 3.2/1.7, 3.2/1.8, 3.2/1.9, 3.2/2.0, 3.2/2.5 mg/mL or higher of CpG/Al(OH)₃. In one aspect, the immunogenic compositions comprise about 3.3/1.0, 3.3/1.5, 3.3/1.6, 3.3/1.7, 3.3/1.8, 3.3/1.9, 3.3/2.0, 3.3/2.5 mg/mL or higher of CpG/Al(OH)₃. In one aspect, the immunogenic compositions comprise about 3.4/1.0, 3.4/1.5, 3.4/1.6, 3.4/1.7, 3.4/1.8, 3.4/1.9, 3.4/2.0, 3.4/2.5 mg/mL or higher of CpG/Al(OH)₃. In one aspect, the immunogenic compositions comprise about 3.5/1.0, 3.5/1.5, 3.5/1.6, 3.5/1.7, 3.5/1.8, 3.5/1.9, 3.5/2.0, 3.5/2.5 mg/mL or higher of CpG/Al(OH)₃. In one aspect, the immunogenic compositions comprise about 3.6/1.0, 3.6/1.5, 3.6/1.6, 3.6/1.7, 3.6/1.8, 3.6/1.9, 3.6/2.0, 3.6/2.5 mg/mL or higher of CpG/Al(OH)₃. In one aspect, the immunogenic compositions comprise about 3.7/1.0, 3.7/1.5, 3.7/1.6, 3.7/1.7, 3.7/1.8, 3.7/1.9, 3.7/2.0, 3.7/2.5 mg/mL or higher of CpG/Al(OH)₃. In one aspect, the immunogenic compositions comprise about 3.8/1.0, 3.8/1.5, 3.8/1.6, 3.8/1.7, 3.8/1.8, 3.8/1.9, 3.8/2.0, 3.8/2.5 mg/mL or higher of CpG/Al(OH)₃. In one aspect, the immunogenic compositions comprise about 3.9/1.0, 3.9/1.5, 3.9/1.6, 3.9/1.7, 3.9/1.8, 3.9/1.9, 3.9/2.0, 3.9/2.5 mg/mL or higher of CpG/Al(OH)₃. In one aspect, the immunogenic compositions comprise about 4.0/1.0, 4.0/1.5, 4.0/1.6, 4.0/1.7, 4.0/1.8, 4.0/1.9, 4.0/2.0, 4.0/2.5 mg/mL or higher of CpG/Al(OH)₃. In one aspect, the immunogenic compositions comprise about 4.5/1.0, 4.5/1.5, 4.5/1.6, 4.5/1.7, 4.5/1.8, 4.5/1.9, 4.5/2.0, 4.5/2.5 mg/mL or higher of CpG/Al(OH)₃. In one aspect, the immunogenic compositions comprise about 5.0/1.0, 5.0/1.5, 5.0/1.6, 5.0/1.7, 5.0/1.8, 5.0/1.9, 5.0/2.0, 5.0/2.5 mg/mL or higher of CpG/Al(OH)₃.

### Saponin Containing Liposomal Adjuvants

[0165] In some aspects, the immunogenic compositions described herein comprise C. difficile toxoids, TxdA and TxdB, and a saponin containing liposomal adjuvant.

[0166] The saponin containing liposomal adjuvant may include, but is not limited to, STIMULON™ (QS-21 (Quillaja Saponaria-21), which is a triterpene glycoside or saponin, Aquila, Framingham, Mass.) or particles generated therefrom such as ISCOMs (immune stimulating complexes) and ISCOMATRIX® adjuvant. Accordingly, the compositions of the present invention may be delivered in the form of ISCOMs, ISCOMS containing CTB, liposomes or encapsulated in compounds such as acrylates or poly(DL-lactide-co-glycoside) to form microspheres of a size suited to adsorption. Typically, the term “ISCOM” refers to immunogenic complexes formed between glycosides, such as triterpenoid saponins (particularly Quil A), and antigens which contain a hydrophobic region. In a preferred aspect, the adjuvant is an ISCOMATRIX adjuvant.

[0167] In a further preferred aspect, the saponin containing liposomal adjuvant comprises at least one saponin and a monophosphoryl lipid A (MPLA)-containing liposome composition. In one aspect, the saponin containing liposomal adjuvant comprises at least one saponin and a monophosphoryl lipid A (MPLA)-containing liposome composition, wherein the liposome composition comprises i) a lipid bilayer comprising phospholipids and ii) cholesterol.

[0168] In one aspect, the saponin may be selected from QS-7, QS-18, QS-21, or a mixture thereof. Preferably, the saponin is QS-21.

[0169] In one aspect, the phospholipid is selected from dimyristoyl phosphatidylcholine (DMPC), dipalmitoyl phosphatidylcholine (DPPC), distearyl phosphatidylcholine (DSPC), dimyristoyl phosphatidylglycerol (DMPG), dipalmitoyl phosphatidylglycerol (DPPG), and distearyl phosphatidylglycerol (DSPG). Preferably the phospholipids are DMPC and DMPG.

[0170] In a preferred aspect, the saponin containing liposomal adjuvant comprises QS-21, MPLA, DMPC, DMPG and cholesterol. In a preferred aspect, the saponin containing liposomal adjuvant comprises QS-21, MPLA, DMPC, DMPG and cholesterol in a phosphate buffer. MPLA is preferably Monophosphoryl 3-Deacyl Lipid A (also known as 3D-PHAD®). 3D-PHAD® is a synthetic analogue of MPLA derived from Salmonella minnesota. In a preferred aspect, the saponin containing liposomal adjuvant comprises QS-21, MPLA (3D-PHAD®), DMPC, DMPG and cholesterol.

[0171] In one aspect, the immunogenic composition comprises about 0.05 to about 1.0 mg/mL or higher of QS-21, including about 0.05 mg/mL, about 0.1 mg/mL, about 0.2 mg/mL, about 0.3 mg/mL, about 0.4 mg/mL, about 0.5 mg/mL, about 0.6 mg/mL, about 0.7 mg/mL, about 0.8 mg/mL, about 0.9 mg/mL or about 1.0 mg/mL or higher of QS-21.

[0172] In one aspect, the immunogenic composition comprises about 0.1 to about 0.4 mg/mL of QS-21. In one preferred aspect, the immunogenic composition comprises about 0.2 mg/mL of QS-21.

[0173] In one aspect, the immunogenic composition comprises about 0.1 to about 1.0 mg/mL or higher of MPLA, including about 0.1 mg/mL, about 0.2 mg/mL, about 0.3 mg/mL, about 0.4 mg/mL, about 0.5 mg/mL, about 0.6 mg/mL, about 0.7 mg/mL, about 0.8 mg/mL, about 0.9 mg/mL or about 1.0 mg/mL or higher of MPLA (preferably Monophosphoryl 3-Deacyl Lipid A).

[0174] In one aspect, the immunogenic composition comprises about 0.2 to about 0.6 mg/mL of MPLA (preferably Monophosphoryl 3-Deacyl Lipid A).

[0175] In one preferred aspect, the immunogenic composition comprises about 0.3 to about 0.5 mg/mL of MPLA (preferably Monophosphoryl 3-Deacyl Lipid A).

[0176] In one preferred aspect, the immunogenic composition comprises about 0.4 mg/mL of MPLA (preferably Monophosphoryl 3-Deacyl Lipid A).

[0177] In one aspect, the immunogenic composition comprises about 0.5 to about 20 mg/mL or higher of cholesterol, including about 1.0 mg/mL, about 2.0 mg/mL, about 3.0 mg/mL, about 4.0 mg/mL, about 5.0 mg/mL, about 6.0 mg/mL, about 7.0 mg/mL, about 8.0 mg/mL, about 9.0 mg/mL, about 10.0 mg/mL, about 11.0 mg/mL, about 12.0 mg/mL, about 13.0 mg/mL, about 14.0 mg/mL, about 15.0 mg/mL, about 16.0 mg/mL, about 17.0 mg/mL, about 18.0 mg/mL, about 19.0 mg/mL, about 20.0 mg/mL or higher of cholesterol.

[0178] In one aspect, the immunogenic composition comprises about 5 to about 15 mg/mL of cholesterol. In one preferred aspect, the composition comprises about 11 mg/mL of cholesterol.

[0179] In one aspect, the immunogenic composition comprises about 0.5 to about 20 mg/mL or higher of DMPC, including about 0.5 mg/mL, about 1.0 mg/mL, about 2.0 mg/mL, about 3.0 mg/mL, about 4.0 mg/mL, about 5.0 mg/mL, about 6.0 mg/mL, about 7.0 mg/mL, about 8.0 mg/mL, about 9.0 mg/mL, about 10.0 mg/mL, about 11.0 mg/mL, about 12.0 mg/mL, about 13.0 mg/mL, about 14.0 mg/mL, about 15.0 mg/mL, about 16.0 mg/mL, about 17.0 mg/mL, about 18.0 mg/mL, about 19.0 mg/mL, about 20.0 mg/mL or higher of DMPC.

[0180] In one aspect, the immunogenic composition comprises about 5 to about 20 mg/mL of DMPC. In one aspect, the immunogenic composition comprises about 5 to about 15 mg/mL of DMPC. In one preferred aspect, the immunogenic composition comprises about 14 mg/mL of DMPC.

[0181] In one aspect, the immunogenic composition comprises about 0.5 to about 3.0 mg/mL or higher of DMPG, including about 0.5 mg/mL, about 0.6 mg/mL, about 0.7 mg/mL, about 0.8 mg/mL, about 0.9 mg/mL, about 1.0 mg/mL, about 1.1 mg/mL, about 1.2 mg/mL, about 1.3 mg/mL, about 1.4 mg/mL, about 1.5 mg/mL, about 1.6 mg/mL, about 1.7 mg/mL, about 1.8 mg/mL, about 1.9 mg/mL, about 2.0 mg/mL or higher, at least about 2.5 mg/mL, or at least about 3.0 mg/mL or higher of DMPG.

[0182] In one aspect, the immunogenic composition comprises about 1.0 to about 2.0 mg/mL of DMPG. In one preferred aspect, the immunogenic composition comprises about 1.6 mg/mL of DMPG.

[0183] In a preferred aspect, the immunogenic composition comprising a saponin containing liposomal adjuvant comprises QS-21 at about 0.2 mg/mL, Monophosphoryl 3-Deacyl Lipid A (also known as 3D-PHAD®) at about 0.4 mg/mL, DMPC at about 14 mg/mL, DMPG about 1.6 mg/mL and cholesterol at about 11 mg/mL (LiNA-2).

[0184] In another aspect, the immunogenic composition comprising a saponin containing liposomal adjuvant comprises QS-21 at about 0.4 mg/mL, Monophosphoryl 3-Deacyl Lipid A (also known as 3D-PHAD®) at about 0.8 mg/mL, DMPC at about 28 mg/mL, DMPG about 3.2 mg/mL and cholesterol at about 22 mg/mL.

[0185] In another aspect, the immunogenic composition comprising a saponin containing liposomal adjuvant comprises QS-21 at about 0.1 mg/mL, Monophosphoryl 3-Deacyl Lipid A (also known as 3D-PHAD®) at about 0.2 mg/mL, DMPC at about 7 mg/mL, DMPG about 0.8 mg/mL and cholesterol at about 5.5 mg/mL.

[0186] In another aspect, the immunogenic composition comprising a saponin containing liposomal adjuvant may further comprise a buffer. Exemplary buffers include phosphate (such as potassium phosphate, sodium phosphate); acetate (such as sodium acetate); succinate (such as sodium succinate); glycine; histidine; carbonate, Tris (tris(hydroxymethyl)aminomethane), and/or bicarbonate (such as ammonium bicarbonate) buffers.

[0187] In a preferred aspect, the compositions comprising a saponin containing liposomal adjuvant may include a phosphate buffer. Preferred amounts of phosphate buffer include a concentration from 1 mM, 5 mM, 6 mM, 7 mM, 8 mM, 9 mM, 10 mM, 11 mM, 12 mM, 13 mM, 14 mM, 15 mM, 16 mM, 17 mM, 18 mM, 19 mM, 20 mM, 50 mM, or 100 mM. In one aspect, the saponin containing liposomal adjuvant includes phosphate buffer at a concentration of about 5 mM to about 15 mM. In one aspect, the saponin containing liposomal adjuvant includes phosphate buffer at a concentration of about 8 mM to 12 mM. In a preferred aspect, the saponin containing liposomal adjuvant includes phosphate buffer at a concentration of about 10 mM.

[0188] The saponin containing liposomal adjuvant may further comprise a salt. Exemplary salts include magnesium chloride, potassium chloride, sodium chloride and a combination thereof.

[0189] In a preferred aspect, the saponin containing liposomal adjuvant includes sodium chloride (NaCl). Preferred amounts of sodium chloride include a concentration from a minimum of about 10 mM, 20 mM, 25 mM, 30 mM, 40 mM, 50 mM, 60 mM, 75 mM, 80 mM, 90 mM, 100 mM, 125 mM, 150 mM, 175 mM, 200 mM, 225 mM, 250 mM, 270 mM, or 300 mM. In a preferred aspect, the saponin containing liposomal adjuvant includes sodium chloride at a concentration of about 100 to about 200 mM. In a preferred aspect, the saponin containing liposomal adjuvant includes sodium chloride at a concentration of about 150 mM.

[0190] In a preferred aspect, an immunogenic composition comprises lyophilized C. difficile toxoid A and toxoid B, reconstituted with a saponin containing liposomal adjuvant comprising about 0.2 mg/mL QS-21, about 0.4 mg/mL Monophosphoryl 3-Deacyl Lipid A (also known as 3D-PHAD®), about 14 mg/mL DMPC, about 1.6 mg/mL DMPG and about 11 mg/mL cholesterol (LiNA-2). In preferred aspect, an immunogenic composition comprises lyophilized C. difficile toxoid A and toxoid B, reconstituted with a saponin containing liposomal adjuvant comprising about 0.2 mg/mL QS-21, about 0.4 mg/mL Monophosphoryl 3-Deacyl Lipid A (also known as 3D-PHAD®), about 14 mg/mL DMPC, about 1.6 mg/mL DMPG and about 11 mg/mL cholesterol in 10 mM phosphate, 150 mM NaCl at pH 6.2 (LiNA-2). In a preferred aspect, the composition is administered at a dose volume of 0.5 mL.

[0191] In a preferred aspect, an immunogenic composition comprises lyophilized C. difficile toxoid A and toxoid B at 0.4 mg/mL total (200 μg/mL of toxoid A and 200 μg/mL of toxoid B), reconstituted with a saponin containing liposomal adjuvant comprising about 0.2 mg/mL QS-21, about 0.4 mg/mL Monophosphoryl 3-Deacyl Lipid A (also known as 3D-PHAD®), about 14 mg/mL DMPC, about 1.6 mg/mL DMPG and about 11 mg/mL cholesterol (LiNA-2). In preferred aspect, an immunogenic composition comprises lyophilized C. difficile toxoid A and toxoid B, reconstituted with a saponin containing liposomal adjuvant comprising about 0.2 mg/mL QS-21, about 0.4 mg/mL Monophosphoryl 3-Deacyl Lipid A (also known as 3D-PHAD®), about 14 mg/mL DMPC, about 1.6 mg/mL DMPG and about 11 mg/mL cholesterol in 10 mM phosphate, 150 mM NaCl at pH 6.2 (LiNA-2). In a preferred aspect, the composition is administered at a dose volume of 0.5 mL.

[0192] As use herein, “liposomes” refer to closed bilayer membranes containing an entrapped aqueous volume. Liposomes may also be uni-lamellar vesicles possessing a single membrane bilayer or multi-lamellar vesicles with multiple membrane bilayers, each separated from the next by an aqueous layer. The structure of the resulting membrane bilayer is such that the hydrophobic (non-polar) tails of the lipid are oriented toward the center of the bilayer while the hydrophilic (polar) heads orient towards the aqueous phase. Liposomes, as they are ordinarily used, consist of smectic mesophases, and can consist of either phospholipid or nonphospholipid smectic mesophases. Smectic mesophase is most accurately described by Small, HANDBOOK OF LIPID RESEARCH, Vol. 4, Plenum, N.Y., 1986, pp. 49-50.

[0193] The saponin containing liposomal adjuvant may be homogeneous or heterogeneous. As used herein, the term “homogeneous” shall mean a final adjuvant formulation comprising liposomes having a size range of 30-400 nm, as determined by methods known in the art including, but not limited to, Dynamic light scattering (DLS), Transmission electron cryomicroscopy (e.g. cryo-TEM or cryo-EM), Nanoparticle Tracking Analysis (NTA, e.g. ViewSizer). A “homogeneous” adjuvant formulation may also mean a final adjuvant formulation comprising liposomes having a polydispersity index (PDI) of between about 0.05 to 0.5 or between about 0.05 to about 0.3, preferably about 0.3.

[0194] As used herein, the term “heterogeneous” shall mean a final adjuvant formulation comprising liposomes having varying sizes ranging from 30 nm to over 10 micrometers, about 30 nm to 4 micrometers, about 30 nm to 1400 nm, preferably about 30 nm to 1000 nm as determined by methods known in the art including, but not limited to, Dynamic light scattering (DLS), Transmission electron microscopy (e.g. cryo-TEM or cryo-EM), Nanoparticle Tracking Analysis (NTA, e.g. ViewSizer). A “heterogeneous” adjuvant formulation may also mean a final adjuvant formulation comprising liposomes having a polydispersity index (PDI)>0.5. Calculations used for the determination of size and PDI parameters may be found in the ISO standard documents 13321:1996 E and ISO 22412:2008 (Worldwide M.I. Dynamic Light Scattering, Common Terms Defined. Malvern Instruments Limited; Malvern, UK: 2011. pp. 1-6. Inform White Paper). As used herein a “heterogeneous” adjuvant formulation shall also mean a “polydisperse” adjuvant formulation. The term “about” as used herein refers to ±5% of the referenced value.

[0195] In an aspect, the saponin containing liposomal adjuvant of the invention is homogeneous. In another aspect, the saponin containing liposomal adjuvant of the invention is heterogeneous.

[0196] Unless noted otherwise, the saponin containing liposomal adjuvant used in the Examples of the present application is a heterogeneous saponin containing liposomal adjuvant.

[0197] In one aspect, the saponin containing liposomal adjuvant is produced according to the process and methods described in U.S. Provisional Application Nos. 63/319,418 and 63/485,964, and International Publication No. WO2023/175454, which are incorporated by reference herein in their entireties. the disclosures of which are incorporated by reference herein in their entireties Multiple processes are described to prepare heterogeneous and homogeneous liposomal adjuvant formulations scalable for manufacturing.

[0198] In the present invention, the saponin containing liposomal adjuvant may be produced by a first method for producing a homogeneous adjuvant formulation comprising a liposome bilayer comprising (a) monophosphoryl lipid A (MPLA), (b) a saponin, and (c) a liposome composition comprising (i) at least one phospholipid selected from phosphatidylcholine (PC) and/or phosphatidylglycerol (PG), wherein the phospholipid is selected from the group consisting of dimyristoyl phosphatidylcholine (DMPC), dipalmitoyl phosphatidylcholine (DPPC), distearyl phosphatidylcholine (DSPC), dimyristoyl phosphatidylglycerol (DMPG), dipalmitoyl phosphatidylglycerol (DPPG), and distearyl phosphatidylglycerol (DSPG), and a combination thereof, and (ii) cholesterol, wherein the mole percent concentration of the cholesterol in the liposome composition is greater than 50% (mol/mol), or the molar ratio of cholesterol to phospholipid is greater than 1, said method comprising the steps of:
[0199] (i) dissolving the phospholipids, cholesterol and MPLA in an organic solvent to form an organic phase;
[0200] (ii) injecting the organic phase of step (i) into an aqueous phase at a specific flowrate and at a specific ratio of the organic phase to the aqueous phase to form a liposome;
[0201] (iii) stirring the liposome of step (ii) to form an intermediate liposome;
[0202] (iv) removing the organic phase of the intermediate liposome of step (iii);
[0203] (v) concentrating the intermediate liposome of step (iv); and
[0204] (vi) compounding the intermediate liposome of step (v) with a saponin to form a final adjuvant formulation having a size range of about 30-400 nm with a polydispersity of 0.05 to 0.5, thereby producing the homogeneous adjuvant formulation.

[0205] In one aspect of the first method for producing a homogeneous adjuvant composition, wherein in step (i) the phospholipids, cholesterol and MPLA are dissolved in the organic solvent by sonication, heat or a combination thereof, preferably by heating. In one aspect, the organic solvent is ethanol or isopropyl alcohol. In another aspect, the organic phase is heated to a temperature between 45° C. to 65° C.

[0206] In another aspect of the first method for producing a homogeneous adjuvant composition, the aqueous phase comprises water, and optionally, a buffer. In a preferred aspect, the buffer comprises 10 mM phosphate at pH 6.2 containing 150 mM NaCl. In a preferred aspect, the aqueous phase is 10 mM phosphate at pH 6.2 containing 150 mM NaCl. In another aspect, the aqueous phase is at a temperature between 20° C. to 60° C. In another aspect, the flowrate of step (ii) is 0.5 mL/min to 400 mL/min or quick addition. In another aspect, the flowrate of step (ii) is 0.5 mL/min to 400 mL/min. In another aspect, the injection of step (ii) is conducted by rapid injection of the organic phase of step (i).

[0207] In another aspect of the first method for producing a homogeneous adjuvant composition, the intermediate liposome of step (iii) is stirred at a rate of 700 rpm to 900 rpm.

[0208] In another aspect of the first method for producing a homogeneous adjuvant composition, the ratio of organic phase to aqueous phase of step (ii) ranges from 1:4 to 1:16. In a preferred aspect, the ratio is 1:8.

[0209] In another aspect of the first method for producing a homogeneous adjuvant composition, the size of the intermediate liposome in step (iv) is downsized by using a high pressure extruder or a microfluid homogenizer. In one aspect, the size of the liposome is downsized in step (iv) by using membrane sizes ranging from 50 nm to 120 nm or homogenization pressures between 17000 PSI and 24000 PSI, or a combination of both.

[0210] In another aspect of the first method for producing a homogeneous adjuvant composition, the organic solvent is removed before downsizing of step (iv) or after downsizing of step (iv). In one aspect, removing the organic phase of the intermediate liposome of step (iv) is by Tangential Flow Filtration (TFF). In another aspect, the TFF is TFF diafiltration. In another aspect, the TFF comprises membranes having a molecular weight cut-off (MWCO) ranging from 100-500 kDa.

[0211] In another aspect of the first method for producing a homogeneous adjuvant composition, the concentrating of step (v) is by Ultrafiltration. In one aspect, the Ultrafiltration comprises a bioburden reduction filter and a sterile filter.

[0212] In another aspect of the first method for producing a homogeneous adjuvant composition, the compounding of step (vi) is at a mixing speed of 300 rpm. In one aspect, the compounding of step (vi) ranges from 1 hour to 24 hours. In another aspect, the compounding of step (vi) occurs at room temperature or from 2-8° C.

[0213] In another aspect of the first method for producing a homogeneous adjuvant composition, the final adjuvant formulation has a size range of about 30 nm-400 nm.

[0214] In another aspect of the first method for producing a homogeneous adjuvant composition, the final adjuvant formulation has a polydispersity of 0.05 to 0.5.

[0215] In a further aspect of the first method for producing a homogeneous adjuvant composition, the injecting of step (ii) is by pump or syringe injection. In a preferred aspect, the injecting of step (ii) is by pump.

[0216] In one aspect, the saponin containing liposomal adjuvant may be produced by a second method for producing a homogeneous adjuvant formulation comprising a liposome bilayer comprising (a) monophosphoryl lipid A (MPLA), (b) a saponin, and (c) a liposome composition comprising (i) at least one phospholipid selected from phosphatidylcholine (PC) and/or phosphatidylglycerol (PG), wherein the phospholipid is selected from the group consisting of dimyristoyl phosphatidylcholine (DMPC), dipalmitoyl phosphatidylcholine (DPPC), distearyl phosphatidylcholine (DSPC), dimyristoyl phosphatidylglycerol (DMPG), dipalmitoyl phosphatidylglycerol (DPPG), distearyl phosphatidylglycerol (DSPG) and a combination thereof, and (ii) cholesterol, wherein the mole percent concentration of the cholesterol in the liposome composition is greater than 50% (mol/mol), or the molar ratio of cholesterol to phospholipid is greater than 1, said method comprising the steps of:
[0217] (i) dissolving the phospholipids, cholesterol and MPLA in an organic solvent or a mixture of organic solvents to form an organic phase;
[0218] (ii) injecting the organic phase of step (i) into an aqueous phase at a specific flowrate and at a specific ratio of the organic phase to the aqueous phase to form an intermediate liposome;
[0219] (iii) concentrating the intermediate liposome of step (ii);
[0220] (iv) removing the organic phase of the intermediate liposome of step (iii);
[0221] (v) filtering the intermediate liposome of step (iv); and
[0222] (vi) compounding the intermediate liposome of step (v) with a saponin to form a final adjuvant formulation having a size range of about 30-400 nm with a polydispersity of 0.05 to 0.5, thereby producing the homogeneous adjuvant formulation.

[0223] In another aspect of the second method for producing a homogeneous adjuvant composition, in step (i) the phospholipids, cholesterol and MPLA are dissolved in the organic solvent by sonication, heat, stirring or a combination thereof. In one aspect, the organic solvent is ethanol or isopropyl alcohol or other organic solvents. In one aspect, the organic solvent is ethanol or isopropyl alcohol. In another aspect, the organic phase is heated to a temperature between 45° C. to 65° C. Preferably, between 50° C. to 65° C. or between 45° C. to 55° C.

[0224] In another aspect of the second method for producing a homogeneous adjuvant composition, the aqueous phase comprises water, and optionally, a buffer. In one aspect, the buffer comprises 10 mM phosphate at pH 6.2 containing 150 mM NaCl. In a preferred aspect, the aqueous phase is 10 mM phosphate at pH 6.2 containing 150 mM NaCl. In another aspect, the aqueous phase is at a temperature between 20° C. to 65° C. In another aspect, the flowrate of step (ii) is 5 mL/min to 15 mL/min. In another aspect, the flowrate of step (ii) is 12 mL/min. In another aspect, the intermediate liposome of step (ii) is stirred at a rate of 100 rpm to 1000 rpm. In another aspect, the ratio of organic phase to aqueous phase of step (ii) ranges from 1:2 to 1:16. In a preferred aspect, the ratio is 4:7.

[0225] In another aspect of the second method for producing a homogeneous adjuvant composition, the concentrating of step (iii) is by Ultrafiltration.

[0226] In another aspect of the second method for producing a homogeneous adjuvant composition, removing the organic phase of the intermediate liposome of step (iv) is by Tangential Flow Filtration (TFF). In one aspect, the TFF is TFF diafiltration. In another aspect, the TFF comprises membranes having a molecular weight cut-off (MWCO) ranging from 100-500 kDa.

[0227] In another aspect of the second method for producing a homogeneous adjuvant composition, the filtering of step (v) comprises a bioburden reduction filter and a sterile filter.

[0228] In another aspect of the second method for producing a homogeneous adjuvant composition, the compounding of step (vi) is at a mixing speed of 350 rpm for 1 hour at RT.

[0229] In another aspect of the second method for producing a homogeneous adjuvant composition, the final adjuvant formulation has a size range of about 50-200 nm. Preferably, the final adjuvant formulation has a size of about 100 nm.

[0230] In another aspect of the second method for producing a homogeneous adjuvant composition, the final adjuvant formulation has a polydispersity of 0.05 to 0.5. Preferably, the final adjuvant formulation has a PDI of <0.2.

[0231] In a further aspect of the second method for producing a homogeneous adjuvant composition, the injecting of step (ii) is by pump or syringe injection. In a preferred aspect, the injecting of step (ii) is by pump.

[0232] In another aspect, the saponin containing liposomal adjuvant may be produced by a first method for producing a heterogeneous adjuvant formulation comprising a liposome bilayer comprising (a) monophosphoryl lipid A (MPLA), (b) a saponin, and (c) a liposome composition comprising (i) at least one phospholipid selected from phosphatidylcholine (PC) and/or phosphatidylglycerol (PG), wherein the phospholipid is selected from the group consisting of dimyristoyl phosphatidylcholine (DMPC), dipalmitoyl phosphatidylcholine (DPPC), distearyl phosphatidylcholine (DSPC), dimyristoyl phosphatidylglycerol (DMPG), dipalmitoyl phosphatidylglycerol (DPPG), distearyl phosphatidylglycerol (DSPG), and a combination thereof, and (ii) cholesterol, wherein the mole percent concentration of the cholesterol in the liposome composition is greater than 50% (mol/mol), or the molar ratio of cholesterol to phospholipid is greater than 1, said method comprising the steps of:
[0233] (i) dissolving the phospholipids, cholesterol and MPLA in an organic solvent to form a lipid solution as an organic phase;
[0234] (ii) simultaneously injecting the organic phase of step (i) and an aqueous phase together at specific flowrates and at a specific ratio of the organic solvent phase to the aqueous phase to form a liposome;
[0235] (iii) concentrating the intermediate liposome of step (ii);
[0236] (iv) removing the organic phase of the intermediate liposome of step (iii);
[0237] (v) treating the intermediate liposome of step (iv) by microfluidizer for 10 passes at −17500 psi;
[0238] (vi) filtering the intermediate liposome of step (v) using 0.22 um membrane; and
[0239] (vii) compounding the intermediate liposome of step (vi) with a saponin,
   thereby producing the heterogeneous adjuvant formulation.

[0240] In another aspect of the first method for producing a heterogeneous adjuvant formulation, in step (i) the phospholipids, cholesterol and MPLA are dissolved in the organic solvent by sonication, heat, stirring or a combination thereof. In one aspect, the organic solvent is ethanol or isopropyl alcohol or their mixture. In another aspect, the lipid formulation organic phase is heated to a temperature of 45-65° C.

[0241] In another aspect of the first method for producing a heterogeneous adjuvant formulation, the aqueous phase comprises water, and optionally, a buffer. In one aspect, the buffer comprises 10 mM phosphate at pH 6.2 containing 150 mM NaCl. In a preferred aspect, the aqueous phase is 10 mM phosphate at pH 6.2 containing 150 mM NaCl. In another aspect, the aqueous phase is at a temperature between 45-60° C.

[0242] In another aspect of the first method for producing a heterogeneous adjuvant formulation, in step (ii) the organic phase has a flowrate of 0.5 to 2 ml/min and the aqueous phase has a flowrate of 5 to 15 ml/min. In another aspect of the third method, in step (ii) the organic phase has a flowrate of 1.333 ml/min and the aqueous phase has a flowrate of 10.667 ml/min.

[0243] In another aspect of the first method for producing a heterogeneous adjuvant formulation, the intermediate liposome of step (iii) is stirred at a rate of 100 rpm to 900 rpm.

[0244] In another aspect of the first method for producing a heterogeneous adjuvant formulation, the ratio of organic phase to aqueous phase of step (ii) ranges from 1:4 to 1:8. In a preferred aspect, the ratio is 1:8.

[0245] In another aspect of the first method for producing a heterogeneous adjuvant formulation, removing the organic phase of the intermediate liposome of step (iii) and step (iv) is by Tangential Flow Filtration (TFF). In one aspect, the TFF is TFF ultrafiltration and diafiltration. In another aspect, the TFF comprises membranes having a molecular weight cut-off (MWCO) ranging from 100-500 kDa.

[0246] In another aspect of the first method for producing a heterogeneous adjuvant formulation, the concentrating of step (iii) is by Ultrafiltration.

[0247] In another aspect of the first method for producing a heterogeneous adjuvant formulation, the size of the intermediate liposome in step (iv) is treated by using a microfluidizer.

[0248] In another aspect of the first method for producing a heterogeneous adjuvant formulation, the organic solvent is removed before microfluidizing of step (v).

[0249] In another aspect of the first method for producing a heterogeneous adjuvant formulation, a buffer is added to the compounding of step (vii). In one aspect, the compounding of step (vii) is at a mixing speed of 350 rpm for 1 hour to 48 at RT or agitated for 1 hr. In another aspect, following the compounding of step (vii) the intermediate liposome is stored at RT without stirring for up to 48 hours.

[0250] In another aspect of the first method for producing a heterogeneous adjuvant formulation, the final adjuvant formulation has a size of about 300 nm to 1000 nm.

[0251] In another aspect of the first method for producing a heterogeneous adjuvant formulation, the final adjuvant formulation has a polydispersity of 0.4-1.0.

[0252] In a further aspect of the first method for producing a heterogeneous adjuvant formulation, the injecting of step (ii) is by Nanoassemblr or pump or syringe injection.

[0253] In another aspect, the saponin containing liposomal adjuvant may be produced by a second method for producing a heterogeneous adjuvant formulation comprising a liposome bilayer comprising (a) monophosphoryl lipid A (MPLA), (b) a saponin, and (c) a liposome composition comprising (i) at least one phospholipid selected from phosphatidylcholine (PC) and/or phosphatidylglycerol (PG), wherein the phospholipid is selected from the group consisting of dimyristoyl phosphatidylcholine (DMPC), dipalmitoyl phosphatidylcholine (DPPC), distearyl phosphatidylcholine (DSPC), dimyristoyl phosphatidylglycerol (DMPG), dipalmitoyl phosphatidylglycerol (DPPG), distearyl phosphatidylglycerol (DSPG), and a combination thereof, and (ii) cholesterol, wherein the mole percent concentration of the cholesterol in the liposome composition is greater than 50% (mol/mol), or the molar ratio of cholesterol to phospholipid is greater than 1, said method comprising the steps of:
[0254] (i) dissolving the phospholipids, cholesterol and MPLA in an organic solvent to form a lipid formulation an organic phase;
[0255] (ii) injecting the organic phase of step (i) into an aqueous phase at a specific flowrate and at a specific ratio of the organic phase to the aqueous phase to form a liposome;
[0256] (iii) stirring the liposome of step (ii) to form an intermediate liposome;
[0257] (iv) concentrating the intermediate liposome of step (iii);
[0258] (v) removing the organic phase of the intermediate liposome of step (iv); and
[0259] (vi) compounding the intermediate liposome of step (vi) with a saponin,
   thereby producing the heterogeneous adjuvant formulation.

[0260] In another aspect of the second method for producing a heterogeneous adjuvant formulation, in step (i) the phospholipids, cholesterol and MPLA are dissolved in the organic solvent by sonication, heat, stirring or a combination thereof. In one aspect, the organic solvent comprises ethyl acetate and isopropyl alcohol. In another aspect, the lipid formulation organic phase is heated to a temperature from 50° C. to 65° C.

[0261] In another aspect of the second method for producing a heterogeneous adjuvant formulation, the aqueous phase comprises water, and optionally, a buffer. In one aspect, the buffer comprises 10 mM phosphate at pH 6.2 containing 150 mM NaCl. In a preferred aspect, the aqueous phase is 10 mM phosphate at pH 6.2 containing 150 mM NaCl. In another aspect, the aqueous phase is at a temperature of 20-25° C. In a further aspect, the flowrate of step (ii) is 10 to 30 mL/min. In a further aspect, the flowrate of step (ii) is 20 mL/min.

[0262] In another aspect of the second method for producing a heterogeneous adjuvant formulation, the intermediate liposome of step (iii) is stirred at a rate of 100 rpm to 900 rpm.

[0263] In another aspect of the second method for producing a heterogeneous adjuvant formulation, the ratio of organic phase to aqueous phase of step (ii) ranges from 1:4 to 1:8. In a preferred aspect, the ratio is 1.8.

[0264] In another aspect of the second method for producing a heterogeneous adjuvant formulation, the organic solvent is removed before compounding of step (vi).

[0265] In another aspect of the second method for producing a heterogeneous adjuvant formulation, removing the organic phase of the intermediate liposome of step (iv) and step (v) is by Tangential Flow Filtration (TFF). In one aspect, the TFF is TFF ultrafiltration and diafiltration.

[0266] In another aspect, the TFF comprises membranes having a molecular weight cut-off (MWCO) ranging from 100-500 kDa.

[0267] In another aspect of the second method for producing a heterogeneous adjuvant formulation, the concentrating of step (vi) is by Ultrafiltration.

[0268] In another aspect of the second method for producing a heterogeneous adjuvant formulation, a buffer is added to the compounding of step (vi).

[0269] In another aspect of the second method for producing a heterogeneous adjuvant formulation, the compounding of step (vi) is at a mixing speed of 300 rpm for 1 hour at RT. In one aspect, following the compounding of step (vii) the intermediate liposome is stored at RT without stirring for 24 hours.

[0270] In another aspect of the second method for producing a heterogeneous adjuvant formulation, the final adjuvant formulation has a size range of 300 nm to 1000 nm.

[0271] In another aspect of the second method for producing a heterogeneous adjuvant formulation, the final adjuvant formulation has a polydispersity of 0.4 to 1.0.

[0272] In another aspect of the second method for producing a heterogeneous adjuvant formulation, the injecting of step (ii) is by pipette, pump or syringe injection.

[0273] In another aspect, the saponin containing liposomal adjuvant may be produced by a third method for producing a heterogeneous adjuvant formulation comprising a liposome bilayer comprising (a) monophosphoryl lipid A (MPLA), (b) a saponin, and (c) a liposome composition comprising (i) at least one phospholipid selected from phosphatidylcholine (PC) and/or phosphatidylglycerol (PG), wherein the phospholipid is selected from the group consisting of dimyristoyl phosphatidylcholine (DMPC), dipalmitoyl phosphatidylcholine (DPPC), distearyl phosphatidylcholine (DSPC), dimyristoyl phosphatidylglycerol (DMPG), dipalmitoyl phosphatidylglycerol (DPPG), distearyl phosphatidylglycerol (DSPG), and a combination thereof, and (ii) cholesterol, wherein the mole percent concentration of the cholesterol in the liposome composition is greater than 50% (mol/mol), or the molar ratio of cholesterol to phospholipid is greater than 1, said method comprising the steps of:
[0274] (i) preparing a lyophilized organic phase comprising the phospholipids, cholesterol and MPLA;
[0275] (ii) rehydrating the lyophilized organic phase of step (i) with an aqueous phase to form an intermediate liposome;
[0276] (iii) downsizing of the intermediate liposome of step (ii) using microfluidizer;
[0277] (iv) compounding the intermediate liposome of step (iii) with a saponin, thereby producing the heterogeneous adjuvant formulation.

[0278] In another aspect of the third method for producing a heterogeneous adjuvant formulation, in step (i) the phospholipids, cholesterol and MPLA are dissolved in the organic solvent by sonication, heat, stirring or a combination thereof. In one aspect, the organic solvent comprises tert-butyl alcohol (TBA) or its mixture. In another aspect, the lipid organic phase is heated to a temperature from 25° C. to 65° C. In another aspect, the organic phase solution is lyophilized.

[0279] In another aspect of the third method for producing a heterogeneous adjuvant formulation, the aqueous phase comprises water or a buffer. In one aspect, the buffer comprises 10 mM phosphate at pH 6.2 containing 150 mM NaCl. In a preferred aspect, the aqueous phase is 10 mM phosphate at pH 6.2 containing 150 mM NaCl. In another aspect, the aqueous phase is at a temperature from 20° C. to 70° C.

[0280] In another aspect of the third method for producing a heterogeneous adjuvant formulation, the intermediate liposome of step (ii) is stirred at a rate of 100-1000 rpm.

[0281] In another aspect of the third method for producing a heterogeneous adjuvant formulation, the size of the intermediate liposome in step (iii) is downsized with a microfluidizer and pressure at or about 18640 PSI.

[0282] In another aspect of the third method for producing a heterogeneous adjuvant formulation, the organic solvent is removed before rehydration of step (ii). In one aspect, removing the organic solvent is by lyophilization.

[0283] In another aspect of the third method for producing a heterogeneous adjuvant formulation, a buffer is added to the compounding of step (iv).

[0284] In another aspect of the third method for producing a heterogeneous adjuvant formulation, the compounding of step (iv) is at a mixing speed of 300 rpm or by agitation for 1 hour at RT.

[0285] In another aspect of the third method for producing a heterogeneous adjuvant formulation, the compounding of step (iv) the intermediate liposome is stored at RT without stirring for 24 hours.

[0286] In another aspect of the third method for producing a heterogeneous adjuvant formulation, the final adjuvant formulation has a size >300 nm.

[0287] In another aspect of the third method for producing a heterogeneous adjuvant formulation, the final adjuvant formulation has a polydispersity >0.4.

[0288] In one aspect of the methods for producing a homogeneous or heterogeneous adjuvant formulation, the saponin is selected from the group consisting of QS-7, QS-18, QS-21, or a mixture thereof. In a preferred aspect, the saponin is QS-21.

[0289] In one aspect of the methods for producing a homogeneous or heterogeneous adjuvant formulation, said at least one phospholipid is a mixture of dimyristoyl phosphatidylcholine (DMPC) and dimyristoyl phosphatidylglycerol (DMPG).

[0290] In one aspect, the liposome composition of the adjuvant formulation may comprise cholesterol at a mole percent concentration of over 50% (mol/mol), of about 55% to about 71% (mol/mol), or preferably about 55% (mol/mol).

[0291] In one aspect, the saponin containing liposomal adjuvant is a monophosphoryl lipid A (MPLA)-containing liposome composition comprising at least one saponin (e.g., QS-21) as described in U.S. Pat. No. 10,434,167 (e.g. ALFQ), which is hereby incorporated by reference in its entirety.

### Methods and Administration

[0292] The C. difficile toxoids disclosed herein may be used as antigens. For example, they may be part of a vaccine. Therefore, in one aspect, the immunogenic compositions of the invention are for use as a medicament. In an aspect, the immunogenic compositions of the invention are for use as a vaccine.

[0293] Therefore, in an aspect, the immunogenic compositions described herein, comprising C. difficile toxoid A and toxoid B, and an adjuvant, are for use in generating, inducing or eliciting an immune response in a subject. In one aspect, the subject is a mammal, such as a human, non-human primate, cat, sheep, pig, horse, bovine or dog. Preferably, the subject is a human.

[0294] The immunogenic compositions described herein, comprising C. difficile toxoid A and toxoid B, and an adjuvant, may be used in therapeutic or prophylactic methods for preventing, treating or ameliorating a bacterial infection, disease or condition in a human subject.

[0295] The immunogenic compositions described herein, comprising C. difficile toxoid A and toxoid B, and an adjuvant, may be used to prevent, treat or ameliorate a C. difficile infection, disease or condition in a human subject. The immunogenic compositions described herein comprising C. difficile toxoid A and toxoid B, and an adjuvant, may be used to prevent, treat or ameliorate an infection, disease or condition associated with C. difficile in a human subject. The immunogenic compositions described herein may be used to induce or elicit an immune response against C. difficile in a subject.

[0296] The immunogenic compositions described herein, comprising C. difficile toxoid A and toxoid B, and an adjuvant, may be used to prevent, treat or ameliorate a medically attended C. difficile infection, disease or condition in a human subject. The immunogenic compositions described herein may be used to prevent, treat or ameliorate medically attended C. difficile infection, disease or condition by the toxoids contained in the composition in a subject.

[0297] The immunogenic compositions described herein, comprising C. difficile toxoid A and toxoid B, and an adjuvant, may be used to generate, induce or elicit an immune response against C. difficile in a subject to prevent, treat or ameliorate a medically attended C. difficile infection, comprising administering to the subject an immunogenic composition of the present disclosure.

[0298] In one aspect, the invention relates to a method of preventing, treating or ameliorating an infection, disease or condition associated with C. difficile in a human subject, comprising administering to the subject an immunogenic composition of the present disclosure.

[0299] In another aspect, the invention relates to a method of preventing, treating or ameliorating a medically attended C. difficile infection in a human subject, comprising administering to the subject an immunogenic composition of the present disclosure.

[0300] In one aspect, the invention relates to a method of inducing an immune response against C. difficile in a human. In another aspect, the invention relates to a method of vaccinating a human. In one aspect, the method includes administering to the human at least one dose of an immunogenic composition described herein. In one aspect, the method includes administering to the human one dose of an immunogenic composition described herein. In one aspect, the method includes administering to the human two doses of an immunogenic composition described herein.

[0301] In another aspect, the method includes administering to the human a first dose and a second dose of an immunogenic composition described herein.

[0302] In one aspect, the second dose is administered about 6 months after the first dose, such as, for example, in a Month 0, 6 immunization schedule. In one aspect, the second dose is administered at least 20, 30, 50, 60, 100, 120, 160, 170, or 180 days after the first dose, and at most 250, 210, 200, or 190 days after the first dose.

[0303] In one aspect, the second dose is administered about 2 months after the first dose, such as, for example, in a Month 0, 2 immunization schedule. In one aspect, the second dose is administered at least 5, 10, 20, 30, 50, or 60 days after the first dose, and at most 150, 90, 80, or 70 days after the first dose. Any minimum value may be combined with any maximum value described herein to define a range.

[0304] In another aspect, the second dose is administered about 30 days (about 1 month) after the first dose. In another aspect, the second dose is administered about 60 days (about 2 months) after the first dose, such as, for example, in a Month 0, 2 immunization schedule. In another aspect, the second dose is administered about 180 days (about 6 months) after the first dose, such as, for example, in a Month 0, 6 immunization schedule. In yet another aspect, the second dose is administered about 120 days (about 4 months) after the first dose, such as, for example, in a Month 0, 4 immunization schedule.

[0305] In one aspect, the method includes administering to the human a single dose of the immunogenic composition and at most two doses. In one aspect, the method includes administering to the human two doses of the immunogenic composition and at most two doses.

[0306] In one aspect, the two doses are administered within a period of about 6 months after the first dose. In one aspect, the two doses are administered within a period of about 2 months after the first dose. Administering to the human at most two doses of the immunogenic composition may be advantageous. Such advantages include, for example, facilitating a human to comply with a complete administration schedule and facilitating cost-effectiveness of the schedule.

[0307] In one aspect, the method includes further administration of a booster dose to the human after the second dose. For example, a booster does may be administered 6 months or 12 months after the second dose. Further boosters may be administered. In one aspect, the method does not include further administration of a booster to the human after the second dose. A “booster” as used herein refers to an additional administration of the immunogenic composition to the human.

[0308] In one aspect, the method includes administering to the human three doses of an immunogenic composition described herein. In one aspect the method includes administering at most three doses of the immunogenic composition. In one aspect, the three doses are administered within a period of about 6 months after the first dose. In a further aspect, at most three doses within a period of about 6 months are administered to the human.

[0309] In one aspect, the second dose is administered about 30 days (about 1 month) after the first dose, and the third dose is administered about 150 to 180 days after the second dose, such as, for example, in a Month 0, 1, 6 immunization schedule. In another aspect, the second dose is administered about 60 days (about 2 months) after the first dose, and the third dose is administered about 120 to 150 days after the second dose, such as, for example, in a Month 0, 2, 6 month immunization schedule.

[0310] In one aspect, the first dose, second dose, and third dose are administered to the human over a period of about 150, 160, 170, or 180 days, and at most 240, 210 200, or 190 days. Any minimum value may be combined with any maximum value described herein to define a range. In another aspect, the first dose, second dose, and third dose is administered to the human over a period of about 180 days or 6 months. For example, the second dose may be administered to the human about 30 days after the first dose, and the third dose may be administered to the human about 120 days after the second dose. Accordingly, a schedule of administration includes administering a dose to the human at about months 0, 1, and 6. For example, the second dose may be administered to the human about 60 days after the first dose, and the third dose may be administered to the human about 120 days after the second dose. Accordingly, a schedule of administration includes administering a dose to the human at about months 0, 2, and 6.

[0311] In one aspect, the method includes an administration of a booster dose to the human after the third dose. For example, a booster does may be administered 6 months or 12 months after the third dose. Further boosters may be administered. In another aspect, the method does not include administration of a booster dose to the human after the third dose.

[0312] As described above, multiple doses of the immunogenic composition may be administered to the human, and the number of days between each dose may vary. An advantage of the method includes, for example, flexibility for a human to comply with the administration schedules.

[0313] Upon administration of compositions described herein using such methods to a host/subject, an immune response is typically observed, which typically includes a humoral immune response and may involve a cellular immune response.

[0314] In certain aspects, the method may comprise administering the immunogenic composition to a human, subject at risk for infection. In some aspects, the human subject may be at least about any of 40, 50, 55, 65, 75, 80 or 85 years or older. In some aspects, the human subject may be about 40 to about 65 years of age or older. In some aspects, the human subject may be about 65 to about 85 years of age older. In some aspects, the human subject may be about 18 years of age or older. In some aspects, the human subject may be about 50 years of age or older. In some aspects, the human subject may be about 55 years of age or older. In some aspects, the human subject may be about 60 years of age or older. In some aspects, the human subject may be about 65 years of age or older.

[0315] In one aspect, the invention relates to methods for immunizing a subject (e.g., a human being) against C. difficile by administering thereto a composition comprising one or more antigens of C. difficile and an adjuvant. In one aspect, the invention relates to a composition disclosed herein for use in a method for immunizing a subject against C. difficile. In one aspect, the invention relates to a composition disclosed herein for use in a method for immunizing a human subject against C. difficile. In one aspect, the human subject is 40-90 years of age or older. In one aspect, the human subject is 50-85 years of age or older. In one aspect, the human subject is 60-85 years of age or older. In an aspect, the human subject is 65-85 years of age or older. In one aspect, the human subject is 65-69 years of age or older. In an aspect, the human subject is 70-79 years of age or older. In one aspect, the human subject is 75-79 years of age or older. In one aspect, the human subject is at least 50, 55, 60, 61, 62, 63, 64, 65, 66, 67, 68, 69, 70, 71, 72, 73, 74, 75, 76, 77, 78, 79, 80, 81, 82, 83, 84, 85, 86, 87, 88, 89 or 90 years of age or older. In one aspect, the human subject is at least 65, 66, 67, 68, 69, 70, 71, 72, 73, 74, 75, 76, 77, 78, 79, 80, 81, 82, 83, 84 or 85 years of age or older.

[0316] The immunogenic compositions described above may include one mutant C. difficile toxin (A or B), i.e., polypeptides and an adjuvant. Accordingly, the immunogenic compositions can occupy separate vials (e.g., a separate vial for a composition including mutant C. difficile toxin A and a separate vial for a composition including mutant C. difficile toxin B) in the preparation or kit. The immunogenic compositions may be intended for simultaneous, sequential, or separate use.

[0317] In another aspect, the immunogenic compositions described above may include both mutant C. difficile toxins (A and B), i.e., polypeptides. Any combination of mutant C. difficile toxin A and mutant C. difficile toxin B described may be combined for an immunogenic composition. Accordingly, the immunogenic compositions can be combined in a single vial (e.g., a single vial containing both a composition including mutant C. difficile TcdA and a composition including mutant C. difficile TcdB). Preferably, the immunogenic compositions include a mutant C. difficile TcdA and a mutant C. difficile TcdB, i.e., polypeptides.

[0318] In certain aspects, it is preferred that the compositions described herein exhibit immunogenic properties (e.g., inducing a detectable and/or neutralizing and/or protective immune response) following appropriate administration to a subject. The presence of neutralizing and/or protective immune response may be demonstrated as described above and/or by showing that infection by a pathogen (e.g., C. difficile) is affected (e.g., decreased) in individuals (e.g., human being or other animal) to whom the materials described herein have been administered as compared to individuals to whom the materials have not been administered. For instance, one or more test subjects (e.g., human or non-human) may be administered by any suitable route and schedule a composition described herein, and then after a suitable amount of time (e.g., about 1, 2, 3, 4, 5, 6, 7, 8, 9, or 10 weeks) challenged by a pathogenic organism. The animal(s) may be monitored for immune function (e.g., antibody production, T cell activity) following administration and/or challenge. Sera may be analyzed for total antibody response or for expression of particular subtypes using, for example, an antibody ELISA and/or a pathogen neutralization assay. T cell activity may be measured by, for example, measuring IFN-γ production after re-stimulation with the antigen. Statistical analysis (e.g., Fisher's exact test, Wilcoxon test, Mann-Whitney Test) may then be performed on data to determine whether the effectiveness of the material in affecting the immune response.

### Toxin Neutralizing Activity

[0319] Immune response induced by administering the immunogenic compositions of the present invention may be determined using a toxin neutralization assay (TNA), ELISA, or more preferably, a cytotoxicity assay, such as that described in WIPO Patent Application WO/2012/143902, U.S. Pat. No. 9,187,536, and WIPO Patent Application WO/2014/060898, which are each incorporated by reference herein in their respective entireties.

[0320] In one aspect, the immune response induced in the human is neutralizing against a C. difficile strain that expresses a toxin A having an amino acid sequence that has at least 80%, 81%, 82%, 83%, 84%, 85%, 86%, 87%, 88%, 89%, 90%, 91%, 92%, 93%, 94%, 95%, 96%, 97%, 98%, 99%, or 100% identity to the toxoid A of the composition.

[0321] In another aspect, the immune response induced in the human is neutralizing against a C. difficile strain that expresses a toxin B including an amino acid sequence that has at least 80%, 81%, 82%, 83%, 84%, 85%, 86%, 87%, 88%, 89%, 90%, 91%, 92%, 93%, 94%, 95%, 96%, 97%, 98%, 99%, or 100% identity to the toxoid B of the composition.

[0322] The usefulness (e.g., immunogenicity) of any of the materials (e.g., compositions) and/or methods described herein may be assayed by any of the variety of methods known to those of skill in the art. Any one or more of the assays described herein, or any other one or more suitable assays, may be used to determine the suitability of any of the materials described herein for an intended purpose. It is to be understood that these methods are exemplary and non-limiting; other assays may also be suitable. For instance, the compositions described herein typically induce and/or enhance the production of antibodies against C. difficile upon administration to a subject. Such antibodies may be detected in the subject using any of the methods available to those of ordinary skill in the art. For instance, as described in the Examples section, serum may be obtained from a subject and tested by ELISA to detect immunoglobulin type G (IgG) antibodies to C. difficile toxin A and/or toxin B (e.g., “primary immunogenicity data”). Antibodies present in test sera may be reacted with toxin A or B antigens adsorbed to individual wells of a microtiter plate. The amount of antibody bound to the antigen coated wells may be determined using a colorimetric substrate reaction after binding of a secondary anti-IgG (e.g., anti-human IgG) antibody-enzyme conjugate. Substrate for the enzyme is then typically added that causes colorimetric change that was directly proportional to the antibody bound to the antigen. The concentration of antibodies in serum may be derived by extrapolation from a standard curve, which was generated from multiple dilutions of a reference standard serum with defined IgG units (ELISA unit (EU)/mL)). A toxin neutralization assay (TNA) may also be used to quantitate neutralizing antibodies to C. difficile toxin. In this assay, serial diluted serum may be incubated with a fixed amount of C. difficile toxin A or B. Test cells (e.g., Vero cells) may then then added and serum-toxin-cell mixture incubated under appropriate conditions (e.g., 37° C. for 6 days). The ability of the sera to neutralize the cytotoxic effect of the C. difficile toxin may be determined by and correlated to the viability of the cells. The assay utilizes the accumulation of acid metabolites in closed culture wells as an indication of normal cell respiration. In cells exposed to toxin, metabolism and CO₂ production is reduced; consequently, the pH rises (e.g., to 7.4 or higher) as indicated by the phenol red pH indicator in the cell culture medium. At this pH, the medium appears red. Cell controls, or cells exposed to toxin which have been neutralized by antibody, however, metabolize and produce CO₂ in normal amounts; as a result, the pH is maintained (e.g., at 7.0 or below) and at this pH, the medium appears yellow. Therefore, C. difficile toxin neutralizing antibodies correlate with the ability of the serum to neutralize the metabolic effects of C. difficile toxin on cells as evidenced by their ability to maintain a certain pH (e.g., of 7.0 or lower). The color change of the media may be measured (e.g., at 562 nm to 630 nm) using a plate reader to further calculate the antitoxin neutralizing antibody titer at 50% inhibition of the C. difficile toxin-mediated cytotoxicity. In one aspect, the composition induces a toxin neutralizing antibody titer that is at least greater than 1-fold, such as, for example, at least 1.01-fold, 1.1-fold, 1.5-fold, 2-fold, 3-fold, 4-fold, 5-fold, 6-fold, 7-fold, 8-fold, 9-fold, 10-fold, 11-fold, 12-fold, 13-fold, 14-fold, 15-fold, 16-fold, 32-fold, or higher in the human after receiving a dose of the composition than a toxin neutralizing antibody titer in the human prior to receiving said dose, when measured under identical conditions in a toxin neutralization assay.

[0323] The toxin neutralization assay (TNA) utilized for the Examples provided herein is described. Briefly, a 384-well microtiter plate was seeded with IMR-90 cells serving as the target of toxin-mediated cytotoxicity. Each test serum sample was analyzed separately for the ability to neutralize Toxin A or Toxin B. Four serial dilutions of test sera were mixed with fixed concentrations of Toxin A (TcdA) or Toxin B (TcdB) for 60 minutes in a humidified incubator (37° C./5% CO₂) to allow for neutralization of the toxins to occur. All plates included a reference standard and quality controls which consisted of antitoxin antibodies of known titer to monitor assay performance. After the 60-minute incubation, the toxin-antiserum mixture was applied to the IMR-90 cell monolayers and the plates were incubated for an additional 72 hours. Viability of the IMR-90 cell monolayers was then tested using the luciferase-based CellTiter-Glo® reagent which provides a measure of ATP levels in metabolically active cells and was reported as relative luminescence units (RLU). A high ATP level indicates high cell viability and antibody mediated neutralization of TcdA or TcdB. The neutralizing antibody concentration was determined by comparing the RLU value of a test sample to the calibration curve from the antitoxin A or B reference standard using a custom Statistical Analysis System (SAS®) program. The functional antibody concentrations were expressed as arbitrary units per mL (or neutralizing units/mL) of serum. The lower limit of quantitation (LLOQ) for the TcdA and TcdB TNA assays are 75.9 and 249.7 neutralizing units/mL of serum, respectively.

### Sequence Identifiers

[0324] SEQ ID NO: 1 sets forth the amino acid sequence for wild-type C. difficile 630 toxin A (TcdA).
[0325] SEQ ID NO: 2 sets forth the amino acid sequence for wild-type C. difficile 630 toxin B (TcdB).
[0326] SEQ ID NO: 3 sets forth the amino acid sequence for a mutant TcdA having a mutation at positions 285 and 287, as compared to SEQ ID NO: 1.
[0327] SEQ ID NO: 4 sets forth the amino acid sequence for a mutant TcdA having a mutation at positions 285, 287, and 700, as compared to SEQ ID NO: 1.

(SEQ ID NO: 4)
MSLISKEELIKLAYSIRPRENEYKTILTNLDEYNKLTINNNENKYLQLKKLNESIDVEMNKYKTSSRNRA
LSNLKKDILKEVILIKNSNTSPVEKNLHFVWIGGEVSDIALEYIKQWADINAEYNIKLWYDSEAFLVNTL
KKAIVESSTTEALQLLEEEIQNPQFDNMKFYKKRMEFIYDRQKRFINYYKSQINKPTVPTIDDIIKSHLV
SEYNRDETVLESYRTNSLRKINSNHGIDIRANSLFTEQELLNIYSQELLNRGNLAAASDIVRLLALKNEG
GVYLAVAMLPGIHSDLFKTISRPSSIGLDRWEMIKLEAIMKYKKYINNYTSENFDKLDQQLKDNFKLIIE
SKSEKSEIFSKLENLNVSDLEIKIAFALGSVINQALISKQGSYLTNLVIEQVKNRYQFLNQHLNPAIESD
NNFTDTTKIFHDSLENSATAENSMELTKIAPYLQVGEMPEARSTISLSGPGAYASAYYDFINLQENTIEK
TLKASDLIEFKEPENNLSQLTEQEINSLWSFDQASAKYQFEKYVRDYTGGSLSEDNGVDENKNTALDKNY
LLNNKIPSNNVEEAGSKNYVHYIIQLQGDDISYEATCNLESKNPKNSIIIQRNMNESAKSYFLSDDGESI
LELNKYRIPERLKNKEKVKVTFIGHGKDEENTSEFARLSVDSLSNEISSELDTIKLDISPKNVEVNLLGA
NMFSYDENVEETYPGKLLLSIMDKITSTLPDVNKNSITIGANQYEVRINSEGRKELLAHSGKWINKEEAI
MSDLSSKEYIFFDSIDNKLKAKSKNIPGLASISEDIKTLLLDASVSPDTKFILNNLKLNIESSIGDYIYY
EKLEPVKNIIHNSIDDLIDEFNLLENVSDELYELKKLNNLDEKYLISFEDISKNNSTYSVRFINKSNGES
VYVETEKEIFSKYSEHITKEISTIKNSIITDVNGNLLDNIQLDHTSQVNTLNAAFFIQSLIDYSSNKDVL
NDLSTSVKVQLYAQLFSTGLNTIYDSIQLVNLISNAVNDTINVLPTITEGIPIVSTILDGINLGAAIKEL
LDEHDPLLKKELEAKVGVLAINMSLSIAATVASIVGIGAEVTIFLLPIAGISAGIPSLVNNELILHDKAT
SVVNYFNHLSESKKYGPLKTEDDKILVPIDDLVISEIDENNNSIKLGTCNILAMEGGSGHTVTGNIDHFF
SSPSISSHIPSLSIYSAIGIETENLDESKKIMMLPNAPSRVFWWETGAVPGLRSLENDGTRLLDSIRDLY
PGKFYWRFYAFFDYAITTLKPVYEDTNIKIKLDKDTRNFIMPTITTNEIRNKLSYSFDGAGGTYSLLLSS
YPISTNINLSKDDLWIENIDNEVREISIENGTIKKGKLIKDVLSKIDINKNKLIIGNQTIDESGDIDNKD
RYIFLTCELDDKISLIIEINLVAKSYSLLLSGDKNYLISNLSNIIEKINTLGLDSKNIAYNYTDESNNKY
FGAISKTSQKSIIHYKKDSKNILEFYNDSTLEFNSKDFIAEDINVEMKDDINTITGKYYVDNNTDKSIDE
SISLVSKNQVKVNGLYLNESVYSSYLDFVKNSDGHHNTSNEMNLFLDNISFWKLFGFENINFVIDKYFTL
VGKTNLGYVEFICDNNKNIDIYFGEWKTSSSKSTIFSGNGRNVVVEPIYNPDTGEDISTSLDESYEPLYG
IDRYINKVLIAPDLYTSLININTNYYSNEYYPEIIVLNPNTFHKKVNINLDSSSFEYKWSTEGSDFILVR
YLEESNKKILQKIRIKGILSNTQSENKMSIDFKDIKKLSLGYIMSNEKSENSENELDRDHLGFKIIDNKT
YYYDEDSKLVKGLININNSLFYFDPIEFNLVTGWQTINGKKYYFDINTGAALISYKIINGKHFYENNDGV
MQLGVFKGPDGFEYFAPANTQNNNIEGQAIVYQSKELTLNGKKYYFDNDSKAVTGWRIINNEKYYENPNN
AIAAVGLQVIDNNKYYFNPDTAIISKGWQTVNGSRYYFDTDTAIAFNGYKTIDGKHFYFDSDCVVKIGVE
STSNGFEYFAPANTYNNNIEGQAIVYQSKELTLNGKKYYEDNNSKAVTGWQTIDSKKYYENTNTAEAATG
WQTIDGKKYYFNTNTAEAATGWQTIDGKKYYFNTNTAIASTGYTIINGKHFYFNTDGIMQIGVEKGPNGF
EYFAPANTDANNIEGQAILYQNEFLTLNGKKYYFGSDSKAVTGWRIINNKKYYENPNNAIAAIHLCTINN
DKYYFSYDGILQNGYITIERNNFYFDANNESKMVTGVFKGPNGFEYFAPANTHNNNIEGQAIVYQNKELT
LNGKKYYFDNDSKAVTGWQTIDGKKYYENLNTAEAATGWQTIDGKKYYENLNTAEAATGWQTIDGKKYYF
NTNTFIASTGYTSINGKHFYFNTDGIMQIGVEKGPNGFEYFAPANTHNNNIEGQAILYQNKELTLNGKKY
YFGSDSKAVTGLRTIDGKKYYFNTNTAVAVTGWQTINGKKYYFNTNTSIASTGYTIISGKHFYENTDGIM
QIGVFKGPDGFEYFAPANTDANNIEGQAIRYQNRFLYLHDNIYYFGNNSKAATGWVTIDGNRYYFEPNTA
MGANGYKTIDNKNFYFRNGLPQIGVFKGSNGFEYFAPANTDANNIEGQAIRYQNRFLHLLGKIYYFGNNS
KAVTGWQTINGKVYYFMPDTAMAAAGGLFEIDGVIYFFGVDGVKAPGIYG

[0328] SEQ ID NO: 5 sets forth the amino acid sequence for a mutant TcdB having a mutation at positions 286 and 288, as compared to SEQ ID NO: 2.
[0329] SEQ ID NO: 6 sets forth the amino acid sequence for a mutant TcdB having a mutation at positions 286, 288, and 698, as compared to SEQ ID NO: 2.

(SEQ ID NO: 6)
MSLVNRKQLEKMANVRERTQEDEYVAILDALEEYHNMSENTVVEKYLKLKDINSLTDIYIDTYKKSGRNK
ALKKFKEYLVTEVLELKNNNLTPVEKNLHFVWIGGQINDTAINYINQWKDVNSDYNVNVFYDSNAFLINT
LKKTVVESAINDTLESFRENLNDPREDYNKFFRKRMEIIYDKQKNFINYYKAQREENPELIIDDIVKTYL
SNEYSKEIDELNTYIEESLNKITQNSGNDVRNFEEFKNGESENLYEQELVERWNLAAASDILRISALKEI
GGMYLAVAMLPGIQPDLFESIEKPSSVTVDEWEMTKLEAIMKYKEYIPEYTSEHEDMLDEEVQSSFESVL
ASKSDKSEIFSSLGDMEASPLEVKIAFNSKGIINQGLISVKDSYCSNLIVKQIENRYKILNNSLNPAISE
DNDENTTTNTFIDSIMAEANADNGREMMELGKYLRVGFFPDVKTTINLSGPEAYAAAYQDLLMFKEGSMN
IHLIEADLRNFEISKTNISQSTEQEMASLWSEDDARAKAQFEEYKRNYFEGSLGEDDNLDESQNIVVDKE
YLLEKISSLARSSERGYIHYIVQLQGDKISYEAACNLFAKTPYDSVLFQKNIEDSEIAYYYNPGDGEIQE
IDKYKIPSIISDRPKIKLTFIGHGKDEFNTDIFAGFDVDSLSTEIEAAIDLAKEDISPKSIEINLLGANM
FSYSINVEETYPGKLLLKVKDKISELMPSISQDSIIVSANQYEVRINSEGRRELLDHSGEWINKEESIIK
DISSKEYISFNPKENKITVKSKNLPELSTLLQEIRNNSNSSDIELEEKVMLTECEINVISNIDTQIVEER
IEEAKNLTSDSINYIKDEFKLIESISDALCDLKQQNELEDSHFISFEDISETDEGFSIRFINKETGESIF
VETEKTIFSEYANHITEEISKIKGTIFDTVNGKLVKKVNLDTTHEVNTLNAAFFIQSLIEYNSSKESLSN
LSVAMKVQVYAQLFSTGLNTITDAAKVVELVSTALDETIDLLPTLSEGLPIIATIIDGVSLGAAIKELSE
TSDPLLRQEIEAKIGIMAVNLTTATTAIITSSLGIASGFSILLVPLAGISAGIPSLVNNELVLRDKATKV
VDYFKHVSLVETEGVFTLLDDKIMMPQDDLVISEIDENNNSIVLGKCEIWRMEGGSGHTVTDDIDHFFSA
PSITYREPHLSIYDVLEVQKEELDLSKDLMVLPNAPNRVFAWETGWTPGLRSLENDGTKLLDRIRDNYEG
EFYWRYFAFIADALITTLKPRYEDTNIRINLDSNTRSFIVPIITTEYIREKLSYSFYGSGGTYALSLSQY
NMGINIELSESDVWIIDVDNVVRDVTIESDKIKKGDLIEGILSTLSIEENKIILNSHEINESGEVNGSNG
FVSLTESILEGINAIIEVDLLSKSYKLLISGELKILMLNSNHIQQKIDYIGENSELQKNIPYSFVDSEGK
ENGFINGSTKEGLFVSELPDVVLISKVYMDDSKPSFGYYSNNLKDVKVITKDNVNILTGYYLKDDIKISL
SLTLQDEKTIKLNSVHLDESGVAEILKEMNRKGNTNTSDSLMSFLESMNIKSIFVNELQSNIKFILDANE
IISGTTSIGQFEFICDENDNIQPYFIKENTLETNYTLYVGNRQNMIVEPNYDLDDSGDISSTVINFSQKY
LYGIDSCVNKVVISPNIYTDEINITPVYETNNTYPEVIVLDANYINEKINVNINDLSIRYVWSNDGNDFI
LMSTSEENKVSQVKIRFVNVEKDKTLANKLSENFSDKQDVPVSEIILSFTPSYYEDGLIGYDLGLVSLYN
EKFYINNFGMMVSGLIYINDSLYYFKPPVNNLITGFVTVGDDKYYENPINGGAASIGETIIDDKNYYENQ
SGVLQTGVESTEDGEKYFAPANTLDENLEGEAIDETGKLIIDENTYYEDDNYRGAVEWKELDGEMHYESP
ETGKAFKGLNQIGDYKYYFNSDGVMQKGFVSINDNKHYFDDSGVMKVGYTEIDGKHFYFAENGEMQIGVE
NTEDGFKYFAHHNEDLGNEEGEEISYSGILNENNKIYYFDDSFTAVVGWKDLEDGSKYYEDEDTAEAYIG
LSLINDGQYYFNDDGIMQVGFVTINDKVFYFSDSGIIESGVQNIDDNYFYIDDNGIVQIGVEDTSDGYKY
FAPANTVNDNIYGQAVEYSGLVRVGEDVYYFGETYTIETGWIYDMENESDKYYENPETKKACKGINLIDD
IKYYFDEKGIMRTGLISFENNNYYFNENGEMQFGYINIEDKMFYFGEDGVMQIGVENTPDGFKYFAHQNT
LDENFEGESINYTGWLDLDEKRYYFTDEYIAATGSVIIDGEEYYFDPDTAQLVISE

[0330] SEQ ID NO: 7 sets forth the amino acid sequence for a mutant TcdA having a mutation at positions 269, 272, 285, 287, 460, 462, and 700, as compared to SEQ ID NO: 1
[0331] SEQ ID NO: 8 sets forth the amino acid sequence for a mutant TcdB having a mutation at positions 270, 273, 286, 288, 461, 463, and 698, as compared to SEQ ID NO: 2
[0332] SEQ ID NO: 9 sets forth a DNA sequence encoding a wild-type C. difficile 630 toxin A (TcdA).
[0333] SEQ ID NO: 10 sets forth a DNA sequence encoding a wild-type C. difficile 630 toxin B (TcdB).
[0334] SEQ ID NO: 11 sets forth a DNA sequence encoding SEQ ID NO: 3
[0335] SEQ ID NO: 12 sets forth a DNA sequence encoding SEQ ID NO: 4
[0336] SEQ ID NO: 13 sets forth a DNA sequence encoding SEQ ID NO: 5
[0337] SEQ ID NO: 14 sets forth a DNA sequence encoding SEQ ID NO: 6
[0338] SEQ ID NO: 15 sets forth the amino acid sequence for wild-type C. difficile R20291 TcdA.
[0339] SEQ ID NO: 16 sets forth a DNA sequence encoding SEQ ID NO: 15.
[0340] SEQ ID NO: 17 sets forth the amino acid sequence for wild-type C. difficile CD196 TcdA.
[0341] SEQ ID NO: 18 sets forth a DNA sequence encoding SEQ ID NO: 17.
[0342] SEQ ID NO: 19 sets forth the amino acid sequence for wild-type C. difficile VPI10463 TcdA.
[0343] SEQ ID NO: 20 sets forth a DNA sequence encoding SEQ ID NO: 19.
[0344] SEQ ID NO: 21 sets forth the amino acid sequence for wild-type C. difficile R20291 TcdB.
[0345] SEQ ID NO: 22 sets forth a DNA sequence encoding SEQ ID NO: 21.
[0346] SEQ ID NO: 23 sets forth the amino acid sequence for wild-type C. difficile CD196 TcdB.
[0347] SEQ ID NO: 24 sets forth a DNA sequence encoding SEQ ID NO: 23.
[0348] SEQ ID NO: 25 sets forth the amino acid sequence for wild-type C. difficile VPI10463 TcdB.
[0349] SEQ ID NO: 26 sets forth a DNA sequence encoding SEQ ID NO: 25.
[0350] SEQ ID NO: 27 sets forth a DNA sequence of a pathogenicity locus of wild-type C. difficile VPI10463.
[0351] SEQ ID NO: 28 sets forth the amino acid sequence for residues 101 to 293 of SEQ ID NO: 1.
[0352] SEQ ID NO: 29 sets forth the amino acid sequence for residues 1 to 542 of SEQ ID NO: 1.
[0353] SEQ ID NO: 30 sets forth the amino acid sequence for residues 101 to 293 of SEQ ID NO: 2.
[0354] SEQ ID NO: 31 sets forth the amino acid sequence for residues 1 to 543 of SEQ ID NO: 2.
[0355] SEQ ID NO: 32 sets forth the amino acid sequence for residues 543 to 809 of SEQ ID NO: 1.
[0356] SEQ ID NO: 33 sets forth the amino acid sequence for residues 544 to 767 of SEQ ID NO: 2.
[0357] SEQ ID NO: 34 sets forth the amino acid sequence for a mutant TcdA, wherein residues 101, 269, 272, 285, 287, 460, 462, 541, 542, 543, 589, 655, and 700 may be any amino acid.
[0358] SEQ ID NO: 35 sets forth the amino acid sequence for a mutant TcdB, wherein 102, 270, 273, 286, 288, 384, 461, 463, 520, 543, 544, 587, 600, 653, 698, and 751 may be any amino acid.
[0359] SEQ ID NO: 36 sets forth the amino acid sequence for the variable light chain of a neutralizing antibody of C. difficile TcdA (A3-25 mAb).
[0360] SEQ ID NO: 37 sets forth the amino acid sequence for the variable heavy chain of a neutralizing antibody of C. difficile TcdA (A3-25 mAb).
[0361] SEQ ID NO: 38 sets forth the amino acid sequence for CDR1 of the variable light chain of neutralizing antibody of C. difficile TcdA (A3-25 mAb).
[0362] SEQ ID NO: 39 sets forth the amino acid sequence for CDR2 of the variable light chain of neutralizing antibody of C. difficile TcdA (A3-25 mAb).
[0363] SEQ ID NO: 40 sets forth the amino acid sequence for CDR3 of the variable light chain of neutralizing antibody of C. difficile TcdA (A3-25 mAb).
[0364] SEQ ID NO: 41 sets forth the amino acid sequence for CDR1 of the variable heavy chain of neutralizing antibody of C. difficile TcdA (A3-25 mAb).
[0365] SEQ ID NO: 42 sets forth the amino acid sequence for CDR2 of the variable heavy chain of neutralizing antibody of C. difficile TcdA (A3-25 mAb).
[0366] SEQ ID NO: 43 sets forth the amino acid sequence for CDR3 of the variable heavy chain of neutralizing antibody of C. difficile TcdA (A3-25 mAb).
[0367] SEQ ID NO: 44 sets forth a DNA sequence encoding SEQ ID NO: 3.
[0368] SEQ ID NO: 45 sets forth a DNA sequence encoding SEQ ID NO: 4.
[0369] SEQ ID NO: 46 sets forth a DNA sequence encoding SEQ ID NO: 5.
[0370] SEQ ID NO: 47 sets forth a DNA sequence encoding SEQ ID NO: 6.
[0371] SEQ ID NO: 48 sets forth the nucleotide sequence of immunostimulatory oligonucleotide ODN CpG 24555.
[0372] SEQ ID NO: 49 sets forth the amino acid sequence for the variable heavy chain of a C. difficile TcdB neutralizing antibody (B8-26 mAb).
[0373] SEQ ID NO: 50 sets forth the amino acid sequence for the signal peptide of the variable heavy chain of a C. difficile TcdB neutralizing antibody (B8-26 mAb).
[0374] SEQ ID NO: 51 sets forth the amino acid sequence for CDR1 of the variable heavy chain of a C. difficile TcdB neutralizing antibody (B8-26 mAb).
[0375] SEQ ID NO: 52 sets forth the amino acid sequence for CDR2 of the variable heavy chain of a C. difficile TcdB neutralizing antibody (B8-26 mAb).
[0376] SEQ ID NO: 53 sets forth the amino acid sequence for CDR3 of the variable heavy chain of a C. difficile TcdB neutralizing antibody (B8-26 mAb).
[0377] SEQ ID NO: 54 sets forth the amino acid sequence for the constant region of the variable heavy chain of a C. difficile TcdB neutralizing antibody (B8-26 mAb).
[0378] SEQ ID NO: 55 sets forth the amino acid sequence for the variable light chain of a C. difficile TcdB neutralizing antibody (B8-26 mAb).
[0379] SEQ ID NO: 56 sets forth the amino acid sequence for the signal peptide of the variable light chain of a C. difficile TcdB neutralizing antibody (B8-26 mAb).
[0380] SEQ ID NO: 57 sets forth the amino acid sequence for CDR1 of the variable light chain of a C. difficile TcdB neutralizing antibody (B8-26 mAb).
[0381] SEQ ID NO: 58 sets forth the amino acid sequence for CDR2 of the variable light chain of a C. difficile TcdB neutralizing antibody (B8-26 mAb).
[0382] SEQ ID NO: 59 sets forth the amino acid sequence for CDR3 of the variable light chain of a C. difficile TcdB neutralizing antibody (B8-26 mAb).
[0383] SEQ ID NO: 60 sets forth the amino acid sequence for the variable heavy chain of a C. difficile TcdB neutralizing antibody (B59-3 mAb).
[0384] SEQ ID NO: 61 sets forth the amino acid sequence for the signal peptide of the variable heavy chain of a C. difficile TcdB neutralizing antibody (B59-3 mAb).
[0385] SEQ ID NO: 62 sets forth the amino acid sequence for CDR1 of the variable heavy chain of a C. difficile TcdB neutralizing antibody (B59-3 mAb).
[0386] SEQ ID NO: 63 sets forth the amino acid sequence for CDR2 of the variable heavy chain of a C. difficile TcdB neutralizing antibody (B59-3 mAb).
[0387] SEQ ID NO: 64 sets forth the amino acid sequence for CDR3 of the variable heavy chain of a C. difficile TcdB neutralizing antibody (B59-3 mAb).
[0388] SEQ ID NO: 65 sets forth the amino acid sequence for the constant region of the variable heavy chain of a C. difficile TcdB neutralizing antibody (B59-3 mAb).
[0389] SEQ ID NO: 66 sets forth the amino acid sequence for the variable light chain of a C. difficile TcdB neutralizing antibody (B59-3 mAb).
[0390] SEQ ID NO: 67 sets forth the amino acid sequence for the signal peptide of the variable light chain of a C. difficile TcdB neutralizing antibody (B59-3 mAb).
[0391] SEQ ID NO: 68 sets forth the amino acid sequence for CDR1 of the variable light chain of a C. difficile TcdB neutralizing antibody (B59-3 mAb).
[0392] SEQ ID NO: 69 sets forth the amino acid sequence for CDR2 of the variable light chain of a C. difficile TcdB neutralizing antibody (B59-3 mAb).
[0393] SEQ ID NO: 70 sets forth the amino acid sequence for CDR3 of the variable light chain of a C. difficile TcdB neutralizing antibody (B59-3 mAb).
[0394] SEQ ID NO: 71 sets forth the amino acid sequence for the variable heavy chain of a C. difficile TcdB neutralizing antibody (B9-30 mAb).
[0395] SEQ ID NO: 72 sets forth the amino acid sequence for the signal peptide of the variable heavy chain of a C. difficile TcdB neutralizing antibody (B9-30 mAb).
[0396] SEQ ID NO: 73 sets forth the amino acid sequence for CDR1 of the variable heavy chain of a C. difficile TcdB neutralizing antibody (B9-30 mAb).
[0397] SEQ ID NO: 74 sets forth the amino acid sequence for CDR2 of the variable heavy chain of a C. difficile TcdB neutralizing antibody (B9-30 mAb).
[0398] SEQ ID NO: 75 sets forth the amino acid sequence for CDR3 of the variable heavy chain of a C. difficile TcdB neutralizing antibody (B9-30 mAb).
[0399] SEQ ID NO: 76 sets forth the amino acid sequence for the constant region of the variable heavy chain of a C. difficile TcdB neutralizing antibody (B9-30 mAb).
[0400] SEQ ID NO: 77 sets forth the amino acid sequence for the variable light chain of a C. difficile TcdB neutralizing antibody (B9-30 mAb).
[0401] SEQ ID NO: 78 sets forth the amino acid sequence for the signal peptide of the variable light chain of a C. difficile TcdB neutralizing antibody (B9-30 mAb).
[0402] SEQ ID NO: 79 sets forth the amino acid sequence for CDR1 of the variable light chain of a C. difficile TcdB neutralizing antibody (B9-30 mAb).
[0403] SEQ ID NO: 80 sets forth the amino acid sequence for CDR2 of the variable light chain of a C. difficile TcdB neutralizing antibody (B9-30 mAb).
[0404] SEQ ID NO: 81 sets forth the amino acid sequence for CDR3 of the variable light chain of a C. difficile TcdB neutralizing antibody (B9-30 mAb).
[0405] SEQ ID NO: 82 sets forth the amino acid sequence for a mutant TcdB, wherein a residue at positions 102, 270, 273, 286, 288, 384, 461, 463, 520, 543, 544, 587, 600, 653, 698, and 751 may be any amino acid.
[0406] SEQ ID NO: 83 sets forth the amino acid sequence for a mutant TcdA having a mutation at positions 269, 272, 285, 287, 460, 462, and 700, as compared to SEQ ID NO: 1, wherein the methionine at position 1 is absent.
[0407] SEQ ID NO: 84 sets forth the amino acid sequence for a mutant C. difficile toxin A having a mutation at positions 285, 287, and 700, as compared to SEQ ID NO: 1, wherein the methionine at position 1 is absent.

(SEQ ID NO: 84)
SLISKEELIKLAYSIRPRENEYKTILTNLDEYNKLTINNNENKYLQLKKLNESIDVEMNKYKTSSRNRAL
SNLKKDILKEVILIKNSNTSPVEKNLHFVWIGGEVSDIALEYIKQWADINAEYNIKLWYDSEAFLVNTLK
KAIVESSTTEALQLLEEEIQNPQFDNMKFYKKRMEFIYDRQKRFINYYKSQINKPTVPTIDDIIKSHLVS
EYNRDETVLESYRTNSLRKINSNHGIDIRANSLFTEQELLNIYSQELLNRGNLAAASDIVRLLALKNFGG
VYLAVAMLPGIHSDLFKTISRPSSIGLDRWEMIKLEAIMKYKKYINNYTSENFDKLDQQLKDNFKLIIES
KSEKSEIFSKLENLNVSDLEIKIAFALGSVINQALISKQGSYLTNLVIEQVKNRYQFLNQHLNPAIESDN
NFTDTTKIFHDSLENSATAENSMELTKIAPYLQVGFMPEARSTISLSGPGAYASAYYDFINLQENTIEKT
LKASDLIEFKEPENNLSQLTEQEINSLWSFDQASAKYQFEKYVRDYTGGSLSEDNGVDENKNTALDKNYL
LNNKIPSNNVEEAGSKNYVHYIIQLQGDDISYEATCNLESKNPKNSIIIQRNMNESAKSYFLSDDGESIL
ELNKYRIPERLKNKEKVKVTFIGHGKDEENTSEFARLSVDSLSNEISSELDTIKLDISPKNVEVNLLGAN
MFSYDENVEETYPGKLLLSIMDKITSTLPDVNKNSITIGANQYEVRINSEGRKELLAHSGKWINKEEAIM
SDLSSKEYIFFDSIDNKLKAKSKNIPGLASISEDIKTLLLDASVSPDTKFILNNLKLNIESSIGDYIYYE
KLEPVKNIIHNSIDDLIDEFNLLENVSDELYELKKLNNLDEKYLISFEDISKNNSTYSVRFINKSNGESV
YVETEKEIFSKYSEHITKEISTIKNSIITDVNGNLLDNIQLDHTSQVNTLNAAFFIQSLIDYSSNKDVLN
DLSTSVKVQLYAQLFSTGLNTIYDSIQLVNLISNAVNDTINVLPTITEGIPIVSTILDGINLGAAIKELL
DEHDPLLKKELEAKVGVLAINMSLSIAATVASIVGIGAEVTIELLPIAGISAGIPSLVNNELILHDKATS
VVNYFNHLSESKKYGPLKTEDDKILVPIDDLVISEIDENNNSIKLGTCNILAMEGGSGHTVTGNIDHFFS
SPSISSHIPSLSIYSAIGIETENLDESKKIMMLPNAPSRVEWWETGAVPGLRSLENDGTRLLDSIRDLYP
GKFYWRFYAFFDYAITTLKPVYEDTNIKIKLDKDTRNFIMPTITTNEIRNKLSYSFDGAGGTYSLLLSSY
PISTNINLSKDDLWIENIDNEVREISIENGTIKKGKLIKDVLSKIDINKNKLIIGNQTIDESGDIDNKDR
YIFLTCELDDKISLIIEINLVAKSYSLLLSGDKNYLISNLSNIIEKINTLGLDSKNIAYNYTDESNNKYF
GAISKTSQKSIIHYKKDSKNILEFYNDSTLEFNSKDFIAEDINVEMKDDINTITGKYYVDNNTDKSIDES
ISLVSKNQVKVNGLYLNESVYSSYLDFVKNSDGHHNTSNEMNLELDNISEWKLEGFENINFVIDKYFTLV
GKTNLGYVEFICDNNKNIDIYFGEWKTSSSKSTIFSGNGRNVVVEPIYNPDTGEDISTSLDESYEPLYGI
DRYINKVLIAPDLYTSLININTNYYSNEYYPEIIVLNPNTFHKKVNINLDSSSFEYKWSTEGSDFILVRY
LEESNKKILQKIRIKGILSNTQSFNKMSIDFKDIKKLSLGYIMSNFKSENSENELDRDHLGFKIIDNKTY
YYDEDSKLVKGLININNSLFYFDPIEFNLVTGWQTINGKKYYFDINTGAALISYKIINGKHFYENNDGVM
QLGVFKGPDGFEYFAPANTQNNNIEGQAIVYQSKELTLNGKKYYFDNDSKAVTGWRIINNEKYYENPNNA
IAAVGLQVIDNNKYYFNPDTAIISKGWQTVNGSRYYFDTDTAIAFNGYKTIDGKHFYFDSDCVVKIGVES
TSNGFEYFAPANTYNNNIEGQAIVYQSKELTLNGKKYYFDNNSKAVTGWQTIDSKKYYENTNTAEAATGW
QTIDGKKYYFNTNTAEAATGWQTIDGKKYYENTNTAIASTGYTIINGKHFYFNTDGIMQIGVEKGPNGFE
YFAPANTDANNIEGQAILYQNEFLTLNGKKYYFGSDSKAVTGWRIINNKKYYENPNNAIAAIHLCTINND
KYYFSYDGILQNGYITIERNNFYFDANNESKMVTGVFKGPNGFEYFAPANTHNNNIEGQAIVYQNKELTL
NGKKYYFDNDSKAVTGWQTIDGKKYYENLNTAEAATGWQTIDGKKYYENLNTAEAATGWQTIDGKKYYEN
TNTFIASTGYTSINGKHFYFNTDGIMQIGVFKGPNGFEYFAPANTHNNNIEGQAILYQNKELTLNGKKYY
FGSDSKAVTGLRTIDGKKYYFNTNTAVAVTGWQTINGKKYYENTNTSIASTGYTIISGKHFYENTDGIMQ
IGVFKGPDGFEYFAPANTDANNIEGQAIRYQNRFLYLHDNIYYFGNNSKAATGWVTIDGNRYYFEPNTAM
GANGYKTIDNKNFYFRNGLPQIGVFKGSNGFEYFAPANTDANNIEGQAIRYQNRFLHLLGKIYYFGNNSK
AVTGWQTINGKVYYFMPDTAMAAAGGLFEIDGVIYFFGVDGVKAPGIYG

[0408] SEQ ID NO: 85 sets forth the amino acid sequence for a mutant C. difficile toxin B having a mutation at positions 270, 273, 286, 288, 461, 463, and 698, as compared to SEQ ID NO: 2, wherein the methionine at position 1 is absent.
[0409] SEQ ID NO: 86 sets forth the amino acid sequence for a mutant C. difficile toxin B having a mutation at positions 286, 288, and 698, as compared to SEQ ID NO: 2, wherein the methionine at position 1 is absent.

(SEQ ID NO: 86)
SLVNRKQLEKMANVRFRTQEDEYVAILDALEEYHNMSENTVVEKYLKLKDINSLTDIYIDTYKKSGRNKA
LKKFKEYLVTEVLELKNNNLTPVEKNLHFVWIGGQINDTAINYINQWKDVNSDYNVNVFYDSNAFLINTL
KKTVVESAINDTLESFRENLNDPRFDYNKFFRKRMEIIYDKQKNFINYYKAQREENPELIIDDIVKTYLS
NEYSKEIDELNTYIEESLNKITQNSGNDVRNFEEFKNGESFNLYEQELVERWNLAAASDILRISALKEIG
GMYLAVAMLPGIQPDLFESIEKPSSVTVDFWEMTKLEAIMKYKEYIPEYTSEHFDMLDEEVQSSFESVLA
SKSDKSEIFSSLGDMEASPLEVKIAFNSKGIINQGLISVKDSYCSNLIVKQIENRYKILNNSLNPAISED
NDFNTTTNTFIDSIMAEANADNGRFMMELGKYLRVGFFPDVKTTINLSGPEAYAAAYQDLLMFKEGSMNI
HLIEADLRNFEISKTNISQSTEQEMASLWSEDDARAKAQFEEYKRNYFEGSLGEDDNLDESQNIVVDKEY
LLEKISSLARSSERGYIHYIVQLQGDKISYEAACNLFAKTPYDSVLFQKNIEDSEIAYYYNPGDGEIQEI
DKYKIPSIISDRPKIKLTFIGHGKDEFNTDIFAGFDVDSLSTEIEAAIDLAKEDISPKSIEINLLGANMF
SYSINVEETYPGKLLLKVKDKISELMPSISQDSIIVSANQYEVRINSEGRRELLDHSGEWINKEESIIKD
ISSKEYISFNPKFNKITVKSKNLPELSTLLQEIRNNSNSSDIELEEKVMLTECEINVISNIDTQIVEERI
EEAKNLTSDSINYIKDEFKLIESISDALCDLKQQNELEDSHFISFEDISETDEGFSIRFINKETGESIFV
ETEKTIFSEYANHITEEISKIKGTIFDTVNGKLVKKVNLDTTHEVNTLNAAFFIQSLIEYNSSKESLSNL
SVAMKVQVYAQLFSTGLNTITDAAKVVELVSTALDETIDLLPTLSEGLPIIATIIDGVSLGAAIKELSET
SDPLLRQEIEAKIGIMAVNLTTATTAIITSSLGIASGESILLVPLAGISAGIPSLVNNELVLRDKATKVV
DYFKHVSLVETEGVFTLLDDKIMMPQDDLVISEIDENNNSIVLGKCEIWRMEGGSGHTVTDDIDHFFSAP
SITYREPHLSIYDVLEVQKEELDLSKDLMVLPNAPNRVFAWETGWTPGLRSLENDGTKLLDRIRDNYEGE
FYWRYFAFIADALITTLKPRYEDTNIRINLDSNTRSFIVPIITTEYIREKLSYSFYGSGGTYALSLSQYN
MGINIELSESDVWIIDVDNVVRDVTIESDKIKKGDLIEGILSTLSIEENKIILNSHEINESGEVNGSNGF
VSLTFSILEGINAIIEVDLLSKSYKLLISGELKILMLNSNHIQQKIDYIGFNSELQKNIPYSFVDSEGKE
NGFINGSTKEGLFVSELPDVVLISKVYMDDSKPSFGYYSNNLKDVKVITKDNVNILTGYYLKDDIKISLS
LTLQDEKTIKLNSVHLDESGVAEILKFMNRKGNTNTSDSLMSFLESMNIKSIFVNFLQSNIKFILDANFI
ISGTTSIGQFEFICDENDNIQPYFIKFNTLETNYTLYVGNRQNMIVEPNYDLDDSGDISSTVINFSQKYL
YGIDSCVNKVVISPNIYTDEINITPVYETNNTYPEVIVLDANYINEKINVNINDLSIRYVWSNDGNDFIL
MSTSEENKVSQVKIRFVNVFKDKTLANKLSFNFSDKQDVPVSEIILSFTPSYYEDGLIGYDLGLVSLYNE
KFYINNFGMMVSGLIYINDSLYYFKPPVNNLITGFVTVGDDKYYFNPINGGAASIGETIIDDKNYYFNQS
GVLQTGVFSTEDGFKYFAPANTLDENLEGEAIDFTGKLIIDENIYYFDDNYRGAVEWKELDGEMHYFSPE
TGKAFKGLNQIGDYKYYFNSDGVMQKGFVSINDNKHYFDDSGVMKVGYTEIDGKHFYFAENGEMQIGVFN
TEDGFKYFAHHNEDLGNEEGEEISYSGILNFNNKIYYFDDSFTAVVGWKDLEDGSKYYEDEDTAEAYIGL
SLINDGQYYFNDDGIMQVGFVTINDKVFYFSDSGIIESGVQNIDDNYFYIDDNGIVQIGVEDTSDGYKYF
APANTVNDNIYGQAVEYSGLVRVGEDVYYFGETYTIETGWIYDMENESDKYYFNPETKKACKGINLIDDI
KYYFDEKGIMRTGLISFENNNYYFNENGEMQFGYINIEDKMFYFGEDGVMQIGVFNTPDGFKYFAHQNTL
DENFEGESINYTGWLDLDEKRYYFTDEYIAATGSVIIDGEEYYFDPDTAQLVISE

[0410] SEQ ID NO: 87 sets forth the amino acid sequence for wild-type C. difficile 2004013 TcdA.
[0411] SEQ ID NO: 88 sets forth the amino acid sequence for wild-type C. difficile 2004111 TcdA.
[0412] SEQ ID NO: 89 sets forth the amino acid sequence for wild-type C. difficile 2004118 TcdA.
[0413] SEQ ID NO: 90 sets forth the amino acid sequence for wild-type C. difficile 2004205 TcdA.
[0414] SEQ ID NO: 91 sets forth the amino acid sequence for wild-type C. difficile 2004206 TcdA.
[0415] SEQ ID NO: 92 sets forth the amino acid sequence for wild-type C. difficile 2005022 TcdA.
[0416] SEQ ID NO: 93 sets forth the amino acid sequence for wild-type C. difficile 2005088 TcdA.
[0417] SEQ ID NO: 94 sets forth the amino acid sequence for wild-type C. difficile 2005283 TcdA.
[0418] SEQ ID NO: 95 sets forth the amino acid sequence for wild-type C. difficile 2005325 TcdA.
[0419] SEQ ID NO: 96 sets forth the amino acid sequence for wild-type C. difficile 2005359 TcdA.
[0420] SEQ ID NO: 97 sets forth the amino acid sequence for wild-type C. difficile 2006017 TcdA.
[0421] SEQ ID NO: 98 sets forth the amino acid sequence for wild-type C. difficile 2007070 TcdA.
[0422] SEQ ID NO: 99 sets forth the amino acid sequence for wild-type C. difficile 2007217 TcdA.
[0423] SEQ ID NO: 100 sets forth the amino acid sequence for wild-type C. difficile 2007302 TcdA.
[0424] SEQ ID NO: 101 sets forth the amino acid sequence for wild-type C. difficile 2007816 TcdA.
[0425] SEQ ID NO: 102 sets forth the amino acid sequence for wild-type C. difficile 2007838 TcdA.
[0426] SEQ ID NO: 103 sets forth the amino acid sequence for wild-type C. difficile 2007858 TcdA.
[0427] SEQ ID NO: 104 sets forth the amino acid sequence for wild-type C. difficile 2007886 TcdA.
[0428] SEQ ID NO: 105 sets forth the amino acid sequence for wild-type C. difficile 2008222 TcdA.
[0429] SEQ ID NO: 106 sets forth the amino acid sequence for wild-type C. difficile 2009078 TcdA.
[0430] SEQ ID NO: 107 sets forth the amino acid sequence for wild-type C. difficile 2009087 TcdA.
[0431] SEQ ID NO: 108 sets forth the amino acid sequence for wild-type C. difficile 2009141 TcdA.
[0432] SEQ ID NO: 109 sets forth the amino acid sequence for wild-type C. difficile 2009292 TcdA.
[0433] SEQ ID NO: 110 sets forth the amino acid sequence for wild-type C. difficile 2004013 TcdB.
[0434] SEQ ID NO: 111 sets forth the amino acid sequence for wild-type C. difficile 2004111 TcdB.
[0435] SEQ ID NO: 112 sets forth the amino acid sequence for wild-type C. difficile 2004118 TcdB.
[0436] SEQ ID NO: 113 sets forth the amino acid sequence for wild-type C. difficile 2004205 TcdB.
[0437] SEQ ID NO: 114 sets forth the amino acid sequence for wild-type C. difficile 2004206 TcdB.
[0438] SEQ ID NO: 115 sets forth the amino acid sequence for wild-type C. difficile 2005022 TcdB.
[0439] SEQ ID NO: 116 sets forth the amino acid sequence for wild-type C. difficile 2005088 TcdB.
[0440] SEQ ID NO: 117 sets forth the amino acid sequence for wild-type C. difficile 2005283 TcdB.
[0441] SEQ ID NO: 118 sets forth the amino acid sequence for wild-type C. difficile 2005325 TcdB.
[0442] SEQ ID NO: 119 sets forth the amino acid sequence for wild-type C. difficile 2005359 TcdB.
[0443] SEQ ID NO: 120 sets forth the amino acid sequence for wild-type C. difficile 2006017 TcdB.
[0444] SEQ ID NO: 121 sets forth the amino acid sequence for wild-type C. difficile 2006376 TcdB.
[0445] SEQ ID NO: 122 sets forth the amino acid sequence for wild-type C. difficile 2007070 TcdB.
[0446] SEQ ID NO: 123 sets forth the amino acid sequence for wild-type C. difficile 2007217 TcdB.
[0447] SEQ ID NO: 124 sets forth the amino acid sequence for wild-type C. difficile 2007302 TcdB.
[0448] SEQ ID NO: 125 sets forth the amino acid sequence for wild-type C. difficile 2007816 TcdB.
[0449] SEQ ID NO: 126 sets forth the amino acid sequence for wild-type C. difficile 2007838 TcdB.
[0450] SEQ ID NO: 127 sets forth the amino acid sequence for wild-type C. difficile 2007858 TcdB.
[0451] SEQ ID NO: 128 sets forth the amino acid sequence for wild-type C. difficile 2007886 TcdB.
[0452] SEQ ID NO: 129 sets forth the amino acid sequence for wild-type C. difficile 2008222 TcdB.
[0453] SEQ ID NO: 130 sets forth the amino acid sequence for wild-type C. difficile 2009078 TcdB.
[0454] SEQ ID NO: 131 sets forth the amino acid sequence for wild-type C. difficile 2009087 TcdB.
[0455] SEQ ID NO: 132 sets forth the amino acid sequence for wild-type C. difficile 2009141 TcdB.
[0456] SEQ ID NO: 133 sets forth the amino acid sequence for wild-type C. difficile 2009292 TcdB.
[0457] SEQ ID NO: 134 sets forth the amino acid sequence for wild-type C. difficile 014 TcdA.
[0458] SEQ ID NO: 135 sets forth the amino acid sequence for wild-type C. difficile 015 TcdA.
[0459] SEQ ID NO: 136 sets forth the amino acid sequence for wild-type C. difficile 020 TcdA.
[0460] SEQ ID NO: 137 sets forth the amino acid sequence for wild-type C. difficile 023 TcdA.
[0461] SEQ ID NO: 138 sets forth the amino acid sequence for wild-type C. difficile 027 TcdA.
[0462] SEQ ID NO: 139 sets forth the amino acid sequence for wild-type C. difficile 029 TcdA.
[0463] SEQ ID NO: 140 sets forth the amino acid sequence for wild-type C. difficile 046 TcdA.
[0464] SEQ ID NO: 141 sets forth the amino acid sequence for wild-type C. difficile 014 TcdB.
[0465] SEQ ID NO: 142 sets forth the amino acid sequence for wild-type C. difficile 015 TcdB.
[0466] SEQ ID NO: 143 sets forth the amino acid sequence for wild-type C. difficile 020 TcdB.
[0467] SEQ ID NO: 144 sets forth the amino acid sequence for wild-type C. difficile 023 TcdB.
[0468] SEQ ID NO: 145 sets forth the amino acid sequence for wild-type C. difficile 027 TcdB.
[0469] SEQ ID NO: 146 sets forth the amino acid sequence for wild-type C. difficile 029 TcdB.
[0470] SEQ ID NO: 147 sets forth the amino acid sequence for wild-type C. difficile 046 TcdB.
[0471] SEQ ID NO: 148 sets forth the amino acid sequence for wild-type C. difficile 001 TcdA.
[0472] SEQ ID NO: 149 sets forth the amino acid sequence for wild-type C. difficile 002 TcdA.
[0473] SEQ ID NO: 150 sets forth the amino acid sequence for wild-type C. difficile 003 TcdA.
[0474] SEQ ID NO: 151 sets forth the amino acid sequence for wild-type C. difficile 004 TcdA.
[0475] SEQ ID NO: 152 sets forth the amino acid sequence for wild-type C. difficile 070 TcdA.
[0476] SEQ ID NO: 153 sets forth the amino acid sequence for wild-type C. difficile 075 TcdA.
[0477] SEQ ID NO: 154 sets forth the amino acid sequence for wild-type C. difficile 077 TcdA.
[0478] SEQ ID NO: 155 sets forth the amino acid sequence for wild-type C. difficile 081 TcdA.
[0479] SEQ ID NO: 156 sets forth the amino acid sequence for wild-type C. difficile 117 TcdA.
[0480] SEQ ID NO: 157 sets forth the amino acid sequence for wild-type C. difficile 131 TcdA.
[0481] SEQ ID NO: 158 sets forth the amino acid sequence for wild-type C. difficile 001 TcdB.
[0482] SEQ ID NO: 159 sets forth the amino acid sequence for wild-type C. difficile 002 TcdB.
[0483] SEQ ID NO: 160 sets forth the amino acid sequence for wild-type C. difficile 003 TcdB.
[0484] SEQ ID NO: 161 sets forth the amino acid sequence for wild-type C. difficile 004 TcdB.
[0485] SEQ ID NO: 162 sets forth the amino acid sequence for wild-type C. difficile 070 TcdB.
[0486] SEQ ID NO: 163 sets forth the amino acid sequence for wild-type C. difficile 075 TcdB.
[0487] SEQ ID NO: 164 sets forth the amino acid sequence for wild-type C. difficile 077 TcdB.
[0488] SEQ ID NO: 165 sets forth the amino acid sequence for wild-type C. difficile 081 TcdB.
[0489] SEQ ID NO: 166 sets forth the amino acid sequence for wild-type C. difficile 117 TcdB.
[0490] SEQ ID NO: 167 sets forth the amino acid sequence for wild-type C. difficile 131 TcdB.
[0491] SEQ ID NO: 168 sets forth the amino acid sequence for wild-type C. difficile 053 TcdA.
[0492] SEQ ID NO: 169 sets forth the amino acid sequence for wild-type C. difficile 078 TcdA.
[0493] SEQ ID NO: 170 sets forth the amino acid sequence for wild-type C. difficile 087 TcdA.
[0494] SEQ ID NO: 171 sets forth the amino acid sequence for wild-type C. difficile 095 TcdA.
[0495] SEQ ID NO: 172 sets forth the amino acid sequence for wild-type C. difficile 126 TcdA.
[0496] SEQ ID NO: 173 sets forth the amino acid sequence for wild-type C. difficile 053 TcdB.
[0497] SEQ ID NO: 174 sets forth the amino acid sequence for wild-type C. difficile 078 TcdB.
[0498] SEQ ID NO: 175 sets forth the amino acid sequence for wild-type C. difficile 087 TcdB.
[0499] SEQ ID NO: 176 sets forth the amino acid sequence for wild-type C. difficile 095 TcdB.
[0500] SEQ ID NO: 177 sets forth the amino acid sequence for wild-type C. difficile 126 TcdB.
[0501] SEQ ID NO: 178 sets forth the amino acid sequence for wild-type C. difficile 059 TcdA.
[0502] SEQ ID NO: 179 sets forth the amino acid sequence for wild-type C. difficile 059 TcdB.
[0503] SEQ ID NO: 180 sets forth the amino acid sequence for wild-type C. difficile 106 TcdA.
[0504] SEQ ID NO: 181 sets forth the amino acid sequence for wild-type C. difficile 106 TcdB.
[0505] SEQ ID NO: 182 sets forth the amino acid sequence for wild-type C. difficile 017 TcdB.
[0506] SEQ ID NO: 183 sets forth the amino acid sequence for a mutant TcdA having a mutation at positions 285, 287, 700, 972, and 978 as compared to SEQ ID NO: 1.
[0507] SEQ ID NO: 184 sets forth the amino acid sequence for a mutant TcdB having a mutation at positions 286, 288, 698, 970, and 976 as compared to SEQ ID NO: 2.
[0508] SEQ ID NO: 185 through SEQ ID NO: 195 each set forth the amino acid sequence for an exemplary mutant toxin.
[0509] SEQ ID NO: 196 through SEQ ID NO: 212 each set forth the amino acid sequence for an exemplary mutant toxin A.
[0510] SEQ ID NO: 213 through SEQ ID NO: 222 each set forth the amino acid sequence for an exemplary mutant toxin B.
[0511] SEQ ID NO: 223 through SEQ ID NO: 236 each set forth the amino acid sequence for an exemplary mutant toxin A.
[0512] SEQ ID NO: 237 through SEQ ID NO: 243 each set forth the amino acid sequence for an exemplary mutant toxin B.
[0513] SEQ ID NO: 244 through SEQ ID NO: 245 each set forth the amino acid sequence for an exemplary mutant toxin A.
[0514] SEQ ID NO: 246 through SEQ ID NO: 249 each set forth the amino acid sequence for an exemplary mutant toxin B.
[0515] SEQ ID NO: 250 through SEQ ID NO: 253 each set forth the amino acid sequence for an exemplary mutant toxin A.
[0516] SEQ ID NO: 254 sets forth the amino acid sequence for an exemplary mutant toxin.
[0517] SEQ ID NO: 255 through SEQ ID NO: 263 each set forth the amino acid sequence for an exemplary mutant toxin A.
[0518] SEQ ID NO: 264 through SEQ ID NO: 269 each set forth the amino acid sequence for an exemplary mutant toxin B.
[0519] SEQ ID NO: 270 through SEQ ID NO: 275 each set forth the amino acid sequence for an exemplary mutant toxin.
[0520] SEQ ID NO: 276 through SEQ ID NO: 323 each set forth the amino acid sequence for an exemplary mutant toxin A.
[0521] SEQ ID NO: 324 through SEQ ID NO: 373 each set forth the amino acid sequence for an exemplary mutant toxin B.
[0522] SEQ ID NO: 374 through SEQ ID NO: 421 each set forth the amino acid sequence for an exemplary mutant toxin A.
[0523] SEQ ID NO: 422 through SEQ ID NO: 471 each set forth the amino acid sequence for an exemplary mutant toxin B.
[0524] SEQ ID NO: 472 through SEQ ID NO: 519 each set forth the amino acid sequence for an exemplary mutant toxin A.
[0525] SEQ ID NO: 568 through SEQ ID NO: 615 each set forth the amino acid sequence for an exemplary mutant toxin B.
[0526] SEQ ID NO: 520 through SEQ ID NO: 567 each set forth the amino acid sequence for an exemplary mutant toxin A.
[0527] SEQ ID NO: 616 through SEQ ID NO: 663 each set forth the amino acid sequence for an exemplary mutant toxin B.
[0528] SEQ ID NO: 664 through SEQ ID NO: 711 each set forth the amino acid sequence for an exemplary mutant toxin A.
[0529] SEQ ID NO: 712 through SEQ ID NO: 761 each set forth the amino acid sequence for an exemplary mutant toxin B.
[0530] SEQ ID NO: 762 through SEQ ID NO: 800 each set forth the amino acid sequence for a toxin A variant.
[0531] SEQ ID NO: 801 through SEQ ID NO: 840 each set forth the amino acid sequence for a toxin B variant.
[0532] SEQ ID NO: 841 sets forth the nucleotide sequence of a B class oligonucleotide (CpG 1018).
[0533] SEQ ID NO: 842 sets forth the nucleotide sequence of a B class oligonucleotide (CpG 7909).
[0534] SEQ ID NO: 843 sets forth the nucleotide sequence of a B class oligonucleotide (CpG 10103).
[0535] SEQ ID NO: 844 sets forth the nucleotide sequence of a B class oligonucleotide (CpG 1826).
[0536] SEQ ID NO: 845 sets forth the nucleotide sequence of a B class oligonucleotide.
[0537] SEQ ID NO: 846 sets forth the nucleotide sequence of a B class oligonucleotide.
[0538] SEQ ID NO: 847 sets forth the nucleotide sequence of a class oligonucleotide.
[0539] SEQ ID NO: 848 sets forth the nucleotide sequence of a C class oligonucleotide.
[0540] SEQ ID NO: 849 sets forth the nucleotide sequence of a C class oligonucleotide.
[0541] SEQ ID NO: 850 sets forth the nucleotide sequence of a C class oligonucleotide.
[0542] SEQ ID NO: 851 sets forth the nucleotide sequence of a C class oligonucleotide.
[0543] SEQ ID NO: 852 sets forth the nucleotide sequence of a C class oligonucleotide.
[0544] SEQ ID NO: 853 sets forth the nucleotide sequence of a C class oligonucleotide.
[0545] SEQ ID NO: 854 sets forth the nucleotide sequence of a C class oligonucleotide.
[0546] SEQ ID NO: 855 sets forth the nucleotide sequence of a C class oligonucleotide.
[0547] SEQ ID NO: 856 sets forth the nucleotide sequence of a C class oligonucleotide.
[0548] SEQ ID NO: 857 sets forth the nucleotide sequence of a C class oligonucleotide.
[0549] SEQ ID NO: 858 sets forth the nucleotide sequence of a C class oligonucleotide.
[0550] SEQ ID NO: 859 sets forth the nucleotide sequence of a C class oligonucleotide.
[0551] SEQ ID NO: 860 sets forth the nucleotide sequence of a C class oligonucleotide.
[0552] SEQ ID NO: 861 sets forth the nucleotide sequence of a P class oligonucleotide.

### Particular Embodiments of the Invention are Set Forth in the Following Numbered Paragraphs:

[0553] 1. A immunogenic composition comprising a Clostridioides difficile (C. difficile) toxoid A and/or toxoid B, and a CpG adjuvant and/or a saponin containing liposomal adjuvant.
[0554] 2. The immunogenic composition of paragraph 1, comprising a CpG adjuvant.
[0555] 3. The immunogenic composition of paragraph 2, wherein the CpG adjuvant comprises at least one CpG.
[0556] 4. The immunogenic composition of any one of paragraph 2 or 3, wherein the CpG adjuvant comprises a CpG oligonucleotide.
[0557] 5. The immunogenic composition of any one of paragraphs 2-4, wherein the CpG adjuvant comprises a CpG oligonucleotide TLR9 agonist.
[0558] 6. The immunogenic composition of any one of paragraphs 2-5, wherein the CpG adjuvant is a B class CpG.
[0559] 7. The immunogenic composition of any one of paragraphs 2-6, wherein the CpG adjuvant is selected from SEQ ID NOS: 48 and 841-861.
[0560] 8. The immunogenic composition of any one of paragraphs 2-7, wherein the CpG adjuvant comprises CpG 24555 (SEQ ID NO: 48), CpG 1018 (SEQ ID NO: 841), CpG 7909 (SEQ ID NO: 842), CpG 10103 (SEQ ID NO: 843), or CpG 1826 (SEQ ID NO: 844).
[0561] 9. The immunogenic composition of paragraph 8, wherein the CpG adjuvant comprises CpG 24555.
[0562] 10. The immunogenic composition of any one of paragraphs 2-9, comprising about 0.1 to 5 mg/mL or higher the CpG.
[0563] 11. The immunogenic composition of any one of paragraphs 2-9, comprising about 0.1 to about 1.0 mg/mL the CpG.
[0564] 12. The immunogenic composition of any one of paragraphs 2-9, comprising about 0.5 mg/mL the CpG.
[0565] 13. The immunogenic composition of any one of paragraphs 2-9, comprising about 0.5 to about 1.5 mg/mL the CpG.
[0566] 14. The immunogenic composition of any one of paragraphs 2-9, comprising about 1.0 mg/mL the CpG.
[0567] 15. The immunogenic composition of any one of paragraphs 2-9, comprising about 0.8 to about 1.8 mg/mL the CpG.
[0568] 16. The immunogenic composition of any one of paragraphs 2-9, comprising about 1.2 mg/mL the CpG.
[0569] 17. The immunogenic composition of any one of paragraphs 2-9, comprising about 3.0 to about 4.0 mg/mL the CpG.
[0570] 18. The immunogenic composition of any one of paragraphs 2-9, comprising about 3.6 mg/mL the CpG.
[0571] 19. The immunogenic composition of any one of paragraphs 2-18, wherein the CpG adjuvant further comprises an additional adjuvant.
[0572] 20. The immunogenic composition of any one of paragraphs 2-19, wherein the CpG adjuvant further comprises an aluminum salt.
[0573] 21. The immunogenic composition of paragraph 20, wherein the aluminum salt is aluminum phosphate, aluminum sulfate or aluminum hydroxide.
[0574] 22. The immunogenic composition of any one of paragraphs 1-21, wherein the CpG adjuvant further comprises aluminum hydroxide (Al(OH)₃).
[0575] 23. The immunogenic composition of any one of paragraphs 2-22, comprising a CpG and about 0.1 to 5 mg/mL or higher of Al(OH)₃.
[0576] 24. The immunogenic composition of any one of paragraphs 2-22, comprising a CpG and about 0.5 to about 1.5 mg/mL of Al(OH)₃.
[0577] 25. The immunogenic composition of any one of paragraphs 2-22, comprising a CpG and about 1.0 of Al(OH)₃.
[0578] 26. The immunogenic composition of any one of paragraphs 2-22, comprising a CpG and about 1.0 to about 2.5 mg/mL of Al(OH)₃.
[0579] 27. The immunogenic composition of any one of paragraphs 2-22, comprising a CpG and about 1.5 to about 2.5 mg/mL of Al(OH)₃.
[0580] 28. The immunogenic composition of any one of paragraphs 2-22, comprising a CpG and about 1.5 of Al(OH)₃.
[0581] 29. The immunogenic composition of any one of paragraphs 2-22, comprising a CpG and about 1.7 of Al(OH)₃.
[0582] 30. The immunogenic composition of any one of paragraphs 2-22, comprising a CpG and about 1.8 of Al(OH)₃.
[0583] 31. The immunogenic composition of any one of paragraphs 2-32, comprising a CpG and about 2.0 of Al(OH)₃.
[0584] 32. The immunogenic composition of any one of paragraphs 2-22, comprising a CpG and about 2.5 of Al(OH)₃.
[0585] 33. The immunogenic composition of any one of paragraphs 2-22, comprising about 0.5 mg/mL CpG and about 0.1 to 5 mg/mL or higher of Al(OH)₃.
[0586] 34. The immunogenic composition of any one of paragraphs 2-22, comprising about 1.0 mg/mL CpG and about 1.5 mg/mL of Al(OH)₃.
[0587] 35. The immunogenic composition of any one of paragraphs 2-22, comprising about 1.2, 1.3, 1.4, 1.5, or 1.6 mg/mL CpG and about 1.7 mg/mL of Al(OH)₃.
[0588] 36. The immunogenic composition of any one of paragraphs 2-22, comprising about 1.5, 1.6, 1.7, 1.8, or 1.9 mg/mL CpG and about 2.0 mg/mL of Al(OH)₃.
[0589] 37. The immunogenic composition of any one of paragraphs 2-22, comprising about 1.8, 1.9, 2.0, 2.1, 2.2, or 2.4 mg/mL CpG and about 2.5 mg/mL of Al(OH)₃.
[0590] 38. The immunogenic composition of any one of paragraphs 2-22, comprising about 3.6 mg/mL CpG and about 1.8 mg/mL of Al(OH)₃.
[0591] 39. The immunogenic composition of any one of paragraphs 2-22, comprising about 1.4 mg/mL CpG and about 1.7 mg/mL of Al(OH)₃ or higher.
[0592] 40. The immunogenic composition of any one of paragraphs 2-122, comprising about 1.6 mg/mL CpG and about 2.0 mg/mL of Al(OH)₃ or higher.
[0593] 41. The immunogenic composition of any one of paragraphs 2-22, comprising about 2.0 mg/mL CpG and about 2.5 mg/mL of Al(OH)₃ or higher.
[0594] 42. The immunogenic composition of any one of paragraphs 2-22, comprising a mass ratio of CpG/Al(OH)₃ of about 1.21 or higher.
[0595] 43. The immunogenic composition of any one of paragraphs 2-42, wherein the CpG adjuvant comprises a histidine or phosphate buffer.
[0596] 44. The immunogenic composition of paragraph 43, wherein the histidine buffer is at a concentration of about 1 mM to 100 mM.
[0597] 45. The immunogenic composition of paragraph 43, wherein the histidine buffer is at a concentration of about 5 mM to 15 mM.
[0598] 46. The immunogenic composition of paragraph 43, wherein the histidine buffer is at a concentration of about 10 mM.
[0599] 47. The immunogenic composition of paragraph 43, wherein the phosphate buffer is at a concentration of about 1 mM to 100 mM.
[0600] 48. The immunogenic composition of paragraph 43, wherein the phosphate buffer is at a concentration of about 5 mM to 15 mM.
[0601] 49. The immunogenic composition of paragraph 43, wherein the phosphate buffer is at a concentration of about 10 mM.
[0602] 50. The immunogenic composition of any one of paragraphs 2-43, wherein the CpG adjuvant comprises sodium chloride.
[0603] 51. The immunogenic composition of paragraph 50, wherein the sodium chloride is at a concentration of about 10 mM to 300 mM.
[0604] 52. The immunogenic composition of paragraph 51, wherein the sodium chloride is at a concentration of about 20 mM to 100 mM.
[0605] 53. The immunogenic composition of paragraph 51, wherein the sodium chloride is at a concentration of about 50 mM.
[0606] 54. The immunogenic composition of paragraph 51, wherein the sodium chloride is at a concentration of about 60 mM.
[0607] 55. The immunogenic composition of any one of paragraphs 2-54, wherein the CpG adjuvant has a pH of about 6.0 to 7.0.
[0608] 56. The immunogenic composition of paragraph 55, wherein the pH is about 6.5.
[0609] 57. The immunogenic composition of paragraph 2, wherein the CpG adjuvant comprises about 0.5, 1.0, 1.2 or 3.6 mg/mL CpG 24555.
[0610] 58. The immunogenic composition of paragraph 57, wherein the CpG adjuvant comprises 3.6 mg/mL CpG 24555.
[0611] 59. The immunogenic composition of paragraph 57 or 58, wherein the CpG adjuvant comprises 3.6 mg/mL CpG 24555, a histidine buffer and sodium chloride.
[0612] 60. The immunogenic composition of any one of paragraphs 57-59, wherein the CpG adjuvant comprises about 3.6 mg/mL CpG 24555, 10 mM histidine buffer, 60 mM sodium chloride at a pH of about 6.5.
[0613] 61. The immunogenic composition of paragraph 2, wherein the CpG adjuvant comprises about 0.5 mg/mL CpG 24555 and about 1.0 mg/mL of Al(OH)₃, about 1.0 mg/mL CpG 24555 and about 1.0 mg/mL of Al(OH)₃, about 3.6 mg/mL CpG 24555 and about 1.0 mg/mL of Al(OH)₃ or about 1.0 mg/mL CpG 24555 and about 1.5 mg/mL of Al(OH)₃.
[0614] 62. The immunogenic composition of paragraph 61, wherein the CpG adjuvant comprises about 1.0 mg/mL CpG 24555 and about 1.5 mg/mL of Al(OH)₃.
[0615] 63. The immunogenic composition of paragraph 61 or 62, wherein the CpG adjuvant comprises about 1.0 mg/mL CpG 24555 and about 1.5 mg/mL of Al(OH)₃, a histidine buffer and sodium chloride.
[0616] 64. The immunogenic composition of any one of paragraphs 61-63, wherein the CpG adjuvant comprises about 1.0 mg/mL CpG 24555 and about 1.5 mg/mL of Al(OH)₃, 10 mM histidine buffer, 50 mM sodium chloride at a pH of about 6.5.
[0617] 65. The immunogenic composition of paragraph 1, comprising a saponin containing liposomal adjuvant.
[0618] 66. The immunogenic composition of paragraph 65, wherein the saponin containing liposomal adjuvant comprises a saponin and a monophosphoryl lipid A (MPLA)-containing liposome composition.
[0619] 67. The immunogenic composition of paragraph 65 or 66, wherein the saponin containing liposomal adjuvant comprises a saponin and a monophosphoryl lipid A (MPLA)-containing liposome composition, wherein the liposome composition comprises i) a lipid bilayer comprising phospholipids and ii) cholesterol.
[0620] 68. The immunogenic composition of any one of paragraphs 65-67, wherein the saponin is selected from QS-7, QS-18, QS-21, or a mixture thereof.
[0621] 69. The immunogenic composition of any one of paragraphs 65-68, wherein the saponin is QS-21.
[0622] 70. The immunogenic composition of any one of paragraphs 67-69, wherein the phospholipid is selected from dimyristoyl phosphatidylcholine (DMPC), dipalmitoyl phosphatidylcholine (DPPC), distearyl phosphatidylcholine (DSPC), dimyristoyl phosphatidylglycerol (DMPG), dipalmitoyl phosphatidylglycerol (DPPG), and distearyl phosphatidylglycerol (DSPG).
[0623] 71. The immunogenic composition of any one of paragraphs 67-70, wherein the phospholipids are DMPC and DMPG.
[0624] 72. The immunogenic composition any one of paragraphs 65-71, wherein the saponin containing liposomal adjuvant comprises QS-21, Monophosphoryl Lipid A (MPLA), DMPC, DMPG and cholesterol.
[0625] 73. The immunogenic composition of any one of paragraphs 66-72, wherein the MPLA is Monophosphoryl 3-Deacyl Lipid A.
[0626] 74. The immunogenic composition of any one of paragraphs 65-73, comprising about 0.05 to about 1.0 mg/mL or higher of QS-21.
[0627] 75. The immunogenic composition of any one of paragraphs 65-73, comprising about 0.1 to about 0.4 mg/mL of QS-21.
[0628] 76. The immunogenic composition of any one of paragraphs 65-73, comprising about 0.2 mg/mL of QS-21.
[0629] 77. The immunogenic composition of any one of paragraphs 65-76, comprising about 0.1 to about 1.0 mg/mL or higher of MPLA.
[0630] 78. The immunogenic composition of any one of paragraphs 65-76, comprising about 0.2 to about 0.6 mg/mL of MPLA.
[0631] 79. The immunogenic composition of any one of paragraphs 65-76, comprising about 0.3 to about 0.5 mg/mL of MPLA.
[0632] 80. The immunogenic composition of any one of paragraphs 65-76, comprising about 0.4 mg/mL of MPLA.
[0633] 81. The immunogenic composition of any one of paragraphs 65-80, comprising about 0.5 to about 20 mg/mL or higher of cholesterol.
[0634] 82. The immunogenic composition of any one of paragraphs 65-80, comprising about 5 to about 15 mg/mL of cholesterol.
[0635] 83. The immunogenic composition of any one of paragraphs 65-80, comprising about 11 mg/mL of cholesterol.
[0636] 84. The immunogenic composition of any one of paragraphs 65-83, comprising about 0.5 to about 20 mg/mL or higher of DMPC.
[0637] 85. The immunogenic composition of any one of paragraphs 65-83, comprising about 5 to about 15 mg/mL of DMPC.
[0638] 86. The immunogenic composition of any one of paragraphs 65-83, comprising about 14 mg/mL of DMPC.
[0639] 87. The immunogenic composition of any one of paragraphs 65-86, comprising about 0.5 to about 3.0 mg/mL or higher of DMPG.
[0640] 88. The immunogenic composition of any one of paragraphs 65-86, comprising about 1.0 to about 2.0 mg/mL of DMPG.
[0641] 89. The immunogenic composition of any one of paragraphs 65-86 comprising about 1.6 mg/mL of DMPG.
[0642] 90. The immunogenic composition of any one of paragraphs 65 to 89, wherein the saponin containing liposomal adjuvant comprises a histidine or phosphate buffer.
[0643] 91. The immunogenic composition of paragraph 90, wherein the phosphate buffer is at a concentration of about 1 mM to 100 mM.
[0644] 92. The immunogenic composition of paragraph 90, wherein the phosphate buffer is at a concentration of about 5 mM to 15 mM.
[0645] 93. The immunogenic composition of paragraph 90, wherein the phosphate buffer is at a concentration of about 10 mM.
[0646] 94. The immunogenic composition of any one of paragraphs 65 to 93, wherein the saponin containing liposomal adjuvant comprises sodium chloride.
[0647] 95. The immunogenic composition of paragraph 94, wherein the sodium chloride is at a concentration of about 10 mM to 300 mM.
[0648] 96. The immunogenic composition of paragraph 51, wherein the sodium chloride is at a concentration of about 100 mM to 200 mM.
[0649] 97. The immunogenic composition of paragraph 51, wherein the sodium chloride is at a concentration of about 150 mM.
[0650] 98. The immunogenic composition of any one of paragraphs 65-97, wherein the saponin containing liposomal adjuvant has a pH of about 5.5 to 7.0.
[0651] 99. The immunogenic composition of paragraph 55, wherein the pH is about 6.2.
[0652] 100. The immunogenic composition of paragraph 65, wherein the saponin containing liposomal adjuvant comprises about 0.2 mg/mL QS-21, about 0.4 mg/mL Monophosphoryl 3-Deacyl Lipid A, about 14 mg/mL DMPC, about 1.6 mg/mL DMPG and about 11 mg/mL cholesterol.
[0653] 101. The immunogenic composition of paragraph 65, wherein the saponin containing liposomal adjuvant comprises about 0.2 mg/mL QS-21, about 0.4 mg/mL Monophosphoryl 3-Deacyl Lipid A, about 14 mg/mL DMPC, about 1.6 mg/mL DMPG, about 11 mg/mL cholesterol, 10 mM phosphate and 150 mM sodium chloride.
[0654] 102. The immunogenic composition of paragraph 65, wherein the saponin containing liposomal adjuvant comprises about 0.2 mg/mL QS-21, about 0.4 mg/mL Monophosphoryl 3-Deacyl Lipid A, about 14 mg/mL DMPC, about 1.6 mg/mL DMPG, about 11 mg/mL cholesterol, 10 mM phosphate and 150 mM sodium chloride at a pH of about 6.2.
[0655] 103. The immunogenic composition of paragraph 65, wherein the saponin containing liposomal adjuvant comprises about 0.4 mg/mL QS-21, about 0.8 mg/mL Monophosphoryl 3-Deacyl Lipid A, about 28 mg/mL DMPC, about 3.2 mg/mL DMPG and about 22 mg/mL cholesterol.
[0656] 104. The immunogenic composition of paragraph 65, wherein the saponin containing liposomal adjuvant comprises about 0.1 mg/mL QS-21, about 0.2 mg/mL Monophosphoryl 3-Deacyl Lipid A, about 7 mg/mL DMPC, about 0.8 mg/mL DMPG and about 5.5 mg/mL cholesterol.
[0657] 105. The immunogenic composition of any one of paragraphs 1-104, wherein the C. difficile toxoid A comprises the amino acid sequence of SEQ ID NO: 4, wherein the initial methionine is absent, and C. difficile toxoid B comprises the amino acid sequence of SEQ ID NO: 6, wherein the initial methionine is absent.
[0658] 106. The immunogenic composition of any one of paragraphs 1-105, wherein the C. difficile toxoid A comprises the amino acid sequence of SEQ ID NO: 84, and C. difficile toxoid B comprises the amino acid sequence of SEQ ID NO: 86.
[0659] 107. The immunogenic composition of any one of paragraphs 1 to 106, wherein the composition comprises the C. difficile toxoid A and the C. difficile toxoid B in a ratio of about 3:1 to about 1:1.
[0660] 108. The immunogenic composition of any one of paragraphs 1 to 107, wherein the composition comprises 200 μg of toxoid per dose.
[0661] 109. The immunogenic composition of any one of paragraphs 1 to108, further comprising at least one of a buffer, a stabilizer, and a surfactant.
[0662] 110. The immunogenic composition of any one of paragraphs 1 to 73, further comprising 10 mM Tris, 4.5% (/v) trehalose dihydrate and polysorbate 80.
[0663] 111. The immunogenic composition of any one of paragraphs 1 to 110, wherein the C. difficile toxoid A and toxoid B are lyophilized and reconstituted with a CpG adjuvant or a saponin containing liposomal adjuvant.
[0664] 112. The immunogenic composition of paragraph 111, wherein the lyophilized C. difficile toxoid A and toxoid B is reconstituted with a CpG adjuvant comprising about 3.6 mg/mL of CpG 24555.
[0665] 113. The immunogenic composition of paragraph 112, wherein the lyophilized C. difficile toxoid A and toxoid B comprising 0.4 mg/mL total (200 μg/mL of toxoid A and 200 μg/mL of toxoid B) is reconstituted with a CpG adjuvant comprising about 3.6 mg/mL of CpG 24555.
[0666] 114. The immunogenic composition of any one of paragraphs 111, wherein the lyophilized C. difficile toxoid A and toxoid B is reconstituted with a CpG adjuvant comprising about 1.0 mg/mL of CpG 24555 and about 1.5 mg/mL of Al(OH)₃.
[0667] 115. The immunogenic composition of paragraph 114, wherein the lyophilized C. difficile toxoid A and toxoid B comprising 0.4 mg/mL total (200 μg/mL of toxoid A and 200 μg/mL of toxoid B) is reconstituted with a CpG adjuvant comprising about 1.0 mg/mL of CpG 24555 and about 1.5 mg/mL of Al(OH)₃.
[0668] 116. The immunogenic composition of paragraph 111, wherein the lyophilized C. difficile toxoid A and toxoid B is reconstituted with a saponin containing liposomal adjuvant comprising about 0.2 mg/mL QS-21, about 0.4 mg/mL Monophosphoryl 3-Deacyl Lipid A, about 14 mg/mL DMPC, about 1.6 mg/mL DMPG and about 11 mg/mL cholesterol.
[0669] 117. The immunogenic composition of paragraph 116, wherein the lyophilized C. difficile toxoid A and toxoid B comprising 0.4 mg/mL total (200 μg/mL of toxoid A and 200 μg/mL of toxoid B) is reconstituted with a saponin containing liposomal adjuvant comprising about 0.2 mg/mL QS-21, about 0.4 mg/mL Monophosphoryl 3-Deacyl Lipid A, about 14 mg/mL DMPC, about 1.6 mg/mL DMPG and about 11 mg/mL cholesterol.
[0670] 118. The immunogenic composition of any one of paragraphs 1-117, wherein the composition is administered at a dose volume of 0.5 mL.
[0671] 119. The immunogenic composition of any one of paragraphs 1-118, for use as a medicament.
[0672] 120. The immunogenic composition of any one of paragraphs 1-118, for use in a method of eliciting an immune response in a human subject against C. difficile in a human.
[0673] 121. The immunogenic composition of any one of paragraphs 1 to 118, for use as a vaccine.
[0674] 122. The immunogenic composition of any one of paragraphs 119-121, wherein the human subject is administered in a first and second dose of the immunogenic composition.
[0675] 123. The immunogenic composition of any one of paragraphs 119-121, wherein the immunogenic composition is administered in a first and second dose.
[0676] 124. The immunogenic composition of paragraph 123, wherein the second dose is administered about 2 months after the first dose (e.g. M 0, 2).
[0677] 125. The immunogenic composition of paragraphs 123, wherein the second dose is administered about 6 months after the first dose (M 0, 6).
[0678] 126. The immunogenic composition of any one of paragraphs 119-121, wherein the human subject is 18 years of age or older 50 years of age or older, 55 years of age or older, 60 years of age or older, 65 years of age or older, or 70 years of age or older.
[0679] 127. A method of eliciting an immune response in a human subject against C. difficile, the method comprising administering to the human subject an immunogenic composition of any one of paragraphs 1-118.
[0680] 128. A method of preventing, treating or ameliorating an infection, disease or condition associated with C. difficile in a human subject, the method comprising administering to the human subject an immunogenic composition of any one of paragraphs 1-118.
[0681] 129. A method of preventing, treating or ameliorating a medically attended C. difficile infection in a human subject, the method comprising administering to the human subject an immunogenic composition of any one of paragraphs 1-118.
[0682] 130. The method of any one of paragraphs 127-129, wherein the immunogenic composition is administered in a first and second dose.
[0683] 131. The method of paragraph 130, wherein the second dose is administered about 2 months after the first dose (e.g. M 0, 2).
[0684] 132. The method of paragraphs 130, wherein the second dose is administered about 6 months after the first dose (M 0, 6).
[0685] 133. The method of any one of paragraphs 127-132, wherein the human subject is 18 years of age or older 50 years of age or older, 55 years of age or older, 60 years of age or older, 65 years of age or older, or 70 years of age or older.
[0686] 134. The method of any one of paragraphs 127-133, wherein an immune response is elicited and comprises neutralizing antibodies against C. difficile toxin A and/or neutralizing antibodies against C. difficile toxin B.
[0687] 135. The method of any one of paragraphs 127-134, wherein neutralizing antibodies elicited against C. difficile toxin A and/or B is greater after administration of 2 doses of the immunogenic composition compared to administration of 3 doses of the investigational C. difficile vaccine.

[0688] As used herein, the term “about” means within a statistically meaningful range of a value, such as a stated concentration range, time frame, molecular weight, temperature or pH. Such a range can be within an order of magnitude, typically within 20%, more typically within 10%, and even more typically within 5% or within 1% of a given value or range. Sometimes, such a range can be within the experimental error typical of standard methods used for the measurement and/or determination of a given value or range. The allowable variation encompassed by the term “about” will depend upon the particular system under study, and can be readily appreciated by one of ordinary skill in the art. Whenever a range is recited within this application, every whole number integer within the range is also contemplated as an embodiment of the disclosure.

[0689] The terms “comprising”, “comprise” and “comprises” herein are intended by the inventors to be optionally substitutable with the terms “consisting essentially of”, “consist essentially of”, “consists essentially of”, “consisting of”, “consist of” and “consists of”, respectively, in every instance.

[0690] All publications and patent applications mentioned in the specification are indicative of the level of those skilled in the art to which this invention pertains. All references or patent applications cited within this patent specification are incorporated by reference herein.

[0691] The invention is illustrated in the accompanying examples. The examples below are carried out using standard techniques, which are well known and routine to those of skill in the art, except where otherwise described in detail. The examples are illustrative, but do not limit the invention.

### EXAMPLES

### Example 1—Immunogenicity of C. difficile Vaccine Antigens Formulated with a Saponin Containing Liposomal Adjuvant

[0692] The relative immunogenicity of C. difficile toxoid antigens formulated with a saponin containing liposomal adjuvant (LiNA-2), as described herein, was compared to formulations with aluminum hydroxide (Al(OH)₃) in nonhuman primates (NHPs). The toxin neutralization assay (TNA) described herein was used to analyze sera collected to determine functional antitoxin activity. The TNA demonstrates the ability of an antiserum to neutralize the cytotoxic effect mediated by wild type C. difficile toxin A (TcdA) or toxin B (TcdB) in vitro. The TNA provides a quantitative assessment of the functional activity of antibodies that are present in a serum sample. The geometric mean concentrations (GMTs) with 95% confidence intervals (CI) are provided for each C. difficile toxoid antigen.

[0693] Rhesus macaques were immunized IM with Toxoid A (Txd A) and Toxoid B (Txd B) according to the study design in Table 1. Group 1 received C. difficile vaccine antigens formulated with Al(OH)₃. Groups 2, 3 and 4 received the C. difficile vaccine antigens formulated with LiNA-2 adjuvant at Month 0, 1, 6, Month 0, 2 and Month 0, 6, respectively.

TABLE 1
NHP study design with LiNA-2 adjuvanted formulations

| | Number NHPs | | | Dose | Dosing |
|---|---|---|---|---|---|
| Group | per group | Formulation | Composition (per dose) | Route | Schedule |
| 1 | 5 | Al(OH)₃ | 10 μg of each Txd A&B | 0.5 mL | Month |
| | | | 0.5 mg Al(OH)₃ | IM | 0, 1, 6 |
| 2 | 5 | LiNA-2 | 10 μg of each Txd A&B | 0.5 mL | Month |
| | | | 0.2 mg (200 μg) 3D-PHAD ® | IM | 0, 1, 6 |
| | | | 0.1 mg (100 μg) QS-21 | | |
| | | | 7 mg DMPC | | |
| | | | 0.89 mg DMPG | | |
| | | | 5.41 mg Cholesterol | | |
| 3 | 5 | LiNA-2 | 10 μg of each Txd A&B | 0.5 mL | Month |
| | | | 0.2 mg (200 μg) 3D-PHAD ® | IM | 0, 2 |
| | | | 0.1 mg (100 μg) QS-21 | | |
| | | | 7 mg DMPC | | |
| | | | 0.89 mg DMPG | | |
| | | | 5.41 mg Cholesterol | | |
| 4 | 5 | LiNA-2 | 10 μg of each Txd A&B | 0.5 mL | Month |
| | | | 0.2 mg (200 μg) 3D-PHAD ® | IM | 0, 6 |
| | | | 0.1 mg (100 μg) QS-21 | | |
| | | | 7 mg DMPC | | |
| | | | 0.89 mg DMPG | | |
| | | | 5.41 mg Cholesterol | | |

[0694] Sera were collected at multiple time points and the ability to neutralize toxin cytotoxic activity was measured in TNAs. The neutralization titers of individual animals for Toxin B are shown in FIG. 1 and GMTs are provided in Table 2, and illustrate that toxoids formulated with LUNA-2 elicit a robust and more rapid immune response able to neutralize Toxin B cytotoxicity after 2 doses compared to 3 doses formulated with Al(OH)₃. GMTs for Toxin A are provided in Table 3.

TABLE 2
Toxin B neutralizing titers for LiNA-2 adjuvanted formulations

| | Toxin B concentration (Neutralizing units/mL) | | | | | | | |
|---|---|---|---|---|---|---|---|---|
| | Al(OH)₃ | | LiNA-2 | | LiNA-2 | | LiNA-2 | |
| | 0/1/6 | | 0/1/6 | | 0/2 | | 0/6 | |
| Months | GMT | 95% CI | GMT | 95% CI | GMT | 95% CI | GMT | 95% CI |
| 0 | 276 | 214- | 250 | 250- | 250 | 250- | 347 | 270- |
| | | 356 | | 250 | | 250 | | 445 |
| 1 | 447 | 273- | 327 | 208- | 445 | 127- | 308 | 267- |
| | | 731 | | 513 | | 1560 | | 354 |
| 2 | 3016 | 1528- | 9729 | 3551- | 561 | 212- | 1081 | 454- |
| | | 5950 | | 26659 | | 1484 | | 2573 |
| 3 | 2847 | 1414- | 10052 | 6784- | 13498 | 7467- | 771 | 344- |
| | | 5735 | | 14895 | | 24401 | | 1728 |
| 4 | 2793 | 1229- | 8441 | 2263- | 9633 | 5811- | 661 | 259- |
| | | 6351 | | 31484 | | 15972 | | 1682 |
| 6 | 2774 | 1569- | 11279 | 6774- | 9878 | 4762- | 601 | 322- |
| | | 4905 | | 18780 | | 20491 | | 1120 |
| 7 | 12421 | 6179- | 93736 | 18718- | 9701 | 5473- | 23186 | 12215- |
| | | 24969 | | 469416 | | 17196 | | 44009 |
| 12 | 9253 | 6552- | 29754 | 18434- | 19904 | 14325- | 17400 | 10587- |
| | | 13067 | | 48028 | | 27657 | | 28596 |

TABLE 3
Toxin A neutralizing titers for LiNA-2 adjuvanted formulations

| | Toxin A concentration (Neutralizing units/mL) | | | | | | | |
|---|---|---|---|---|---|---|---|---|
| | Al(OH)₃ | | LiNA-2 | | LiNA-2 | | LiNA-2 | |
| | 0/1/6 | | 0/1/6 | | 0/2 | | 0/6 | |
| Months | GMT | 95% CI | GMT | 95% CI | GMT | 95% CI | GMT | 95% CI |
| 0 | 136 | 96- | 117 | 78- | 143 | 118- | 177 | 119- |
| | | 191 | | 177 | | 172 | | 263 |
| 1 | 228 | 109- | 733 | 291- | 883 | 673- | 796 | 316- |
| | | 477 | | 1848 | | 1158 | | 2008 |
| 2 | 2099 | 1135- | 4468 | 2518- | 705 | 300- | 962 | 567- |
| | | 3883 | | 7926 | | 1653 | | 1633 |
| 3 | 927 | 393- | 2442 | 1451- | 3389 | 1188- | 979 | 456- |
| | | 2185 | | 4110 | | 9667 | | 2102 |
| 4 | 503 | 177-1 | 1834 | 1158- | 1954 | 1166- | 703 | 385- |
| | | 430 | | 2905 | | 3272 | | 1286 |
| 6 | 461 | 174- | 1742 | 739- | 1814 | 868- | 581 | 356- |
| | | 1218 | | 4108 | | 3789 | | 948 |
| 7 | 2348 | 1486- | 6032 | 2242- | 1336 | 525- | 18895 | 8332- |
| | | 3710 | | 16230 | | 3401 | | 42851 |
| 12 | 1097 | 568- | 4452 | 3215- | 2644 | 1030- | 4125 | 2933- |
| | | 2120 | | 6167 | | 6784 | | 5801 |

### Example 2—Immunogenicity of C. difficile Vaccine Antigens Formulated with a Saponin Containing Liposomal Adjuvant or CpG Adjuvant+Al(OH)₃ Administered at Month 0, 2 and Month 0, 6

[0695] The relative immunogenicity of C. difficile toxoid antigens formulated with a saponin containing liposomal adjuvant (LiNA-2) or CpG adjuvant (CpG 24555) combined with Al(OH)₃ was compared to formulations with Al(OH)₃ in NHPs. The toxin neutralization assay described in Example 1 was used to measure the functional cytotoxic activity of sera at multiple time points following immunization. The geometric mean concentrations (GMTs) with 95% confidence intervals (CI) are provided for each C. difficile toxoid antigen.

[0696] Rhesus macaques were immunized IM with Txd A and Txd B according to the study design in Table 4. Group 1 received C. difficile vaccine antigens formulated with Al(OH)₃, at Month 0, 1, 6. Groups 2 and 3 received the C. difficile vaccine antigens formulated with LiNA-2 adjuvant at Month 0, 2 and Month 0, 6, respectively. Groups 4 and 5 received the C. difficile vaccine antigens formulated with 1 mg/mL CpG adjuvant+1 mg/mL Al(OH)₃ at Month 0, 2 and Month 0, 6, respectively.

TABLE 4
NHP study design with LiNA-2 and CpG/Al(OH)₃ adjuvanted formulations

| | Number NHPs | | | Dose | Dosing |
|---|---|---|---|---|---|
| Group | per group | Formulation | Composition (per dose) | Route | Schedule |
| 1 | 5 | Al(OH)₃ | 10 μg of each Txd A&B | 0.5 mL | Month |
| | | | 0.5 mg Al(OH)₃ | IM | 0, 1, 6 |
| 2 | 5 | LiNA-2 | 10 μg of each Txd A&B | 0.5 mL | Month |
| | | | 0.2 mg (200 μg) 3D-PHAD ® | IM | 0, 2 |
| | | | 0.1 mg (100 μg) QS-21 | | |
| | | | 7 mg DMPC | | |
| | | | 0.89 mg DMPG | | |
| | | | 5.41 mg Cholesterol | | |
| 3 | 5 | LiNA-2 | 10 μg of each Txd A&B | 0.5 mL | Month |
| | | | 0.2 mg (200 μg) 3D-PHAD ® | IM | 0, 6 |
| | | | 0.1 mg (100 μg) QS-21 | | |
| | | | 7 mg DMPC | | |
| | | | 0.89 mg DMPG | | |
| | | | 5.41 mg Cholesterol | | |
| 4 | 5 | CpG/Al(OH)₃ | 10 μg of each Txd A&B | 0.5 mL | Month |
| | | | 0.5 mg CpG | IM | 0, 2 |
| | | | 0.5 mg Al(OH)₃ | | |
| 5 | 5 | CpG/Al(OH)₃ | 10 μg of each Txd A&B | 0.5 mL | Month |
| | | | 0.5 mg CpG | IM | 0, 6 |
| | | | 0.5 mg Al(OH)₃ | | |

[0697] Sera were collected at multiple time points and the ability to neutralize toxin cytotoxic activity was measured in TNAs. The neutralization titers of individual animals for Toxin B immunized at Month 0, 2 are show in FIG. 2 and GMTs are provided in Table 5. Toxoid antigens administered with either the LiNA-2 or the CpG+Al(OH)₃ formulations on the Month 0, 2 schedule elicited a robust and more rapid immune response able to neutralize Toxin B cytotoxicity after 2 doses compared to 3 doses formulated with Al(OH)₃. Both the LiNA-2 and the CpG+Al(OH)₃ adjuvanted formulations elicited responses that are comparable to the responses determined following 3 doses of the Al(OH)₃ formulated toxoid antigens. The functional immune response measured in both of the adjuvanted formulation groups vaccinated using the abbreviated Month 0, 2 schedule were durable to study Month 12 (10 months following the second dose). GMTs for Toxin A are provided in Table 6.

TABLE 5
Toxin B neutralizing titers for LiNA-2 and
CpG/Al(OH)₃ adjuvanted formulations (0.2M)

| | Toxin B concentration (Neutralizing units/mL) | | | | | |
|---|---|---|---|---|---|---|
| | Al(OH)₃ | | LiNA-2 | | CpG/Al(OH)₃ | |
| | 0/1/6 | | 0/2 | | 0/2 | |
| Months | GMT | 95% CI | GMT | 95% CI | GMT | 95% CI |
| 0 | 276 | 214- | 250 | 250- | 250 | 250- |
| | | 356 | | 250 | | 250 |
| 1 | 447 | 273- | 445 | 127- | 279 | 244- |
| | | 731 | | 1560 | | 318 |
| 2 | 3016 | 1528- | 561 | 212- | 682 | 354- |
| | | 5950 | | 1484 | | 1313 |
| 3 | 2847 | 1414- | 13498 | 7467- | Time point not measured | |
| | | 5735 | | 24401 | | |
| 4 | 2793 | 1229- | 9633 | 5811- | 14586 | 8791- |
| | | 6351 | | 15972 | | 24201 |
| 6 | 2774 | 1569- | 9878 | 4762- | 15058 | 7104- |
| | | 4905 | | 20491 | | 31916 |
| 7 | 12421 | 6179- | 9701 | 5473- | 12666 | 6889- |
| | | 24969 | | 17196 | | 23290 |
| 12 | 9253 | 6552- | 19904 | 14325- | 10240 | 4749- |
| | | 13067 | | 27657 | | 22081 |

TABLE 6
Toxin A neutralizing titers for LiNA-2 and
CpG/Al(OH)₃ adjuvanted formulations (0.2M)

| | Toxin A concentration (Neutralizing units/mL) | | | | | |
|---|---|---|---|---|---|---|
| | Al(OH)₃ | | LiNA-2 | | CpG/Al(OH)₃ | |
| | 0/1/6 | | 0/2 | | 0/2 | |
| Months | GMT | 95% CI | GMT | 95% CI | GMT | 95% CI |
| 0 | 136 | 96- | 143 | 118- | 307 | 211- |
| | | 191 | | 172 | | 447 |
| 1 | 228 | 109- | 883 | 673- | 453 | 293- |
| | | 477 | | 1158 | | 701 |
| 2 | 2099 | 1135- | 705 | 300- | 695 | 580- |
| | | 3883 | | 1653 | | 833 |
| 3 | 927 | 393- | 3389 | 1188- | Time point not measured | |
| | | 2185 | | 9667 | | |
| 4 | 503 | 177- | 1954 | 1166- | 1896 | 1544- |
| | | 1430 | | 3272 | | 2328 |
| 6 | 461 | 174- | 1814 | 868- | 1136 | 762- |
| | | 1218 | | 3789 | | 1693 |
| 7 | 2348 | 1486- | 1336 | 525- | 891 | 566- |
| | | 3710 | | 3401 | | 1405 |
| 12 | 1097 | 568- | 2644 | 1030- | 467 | 261- |
| | | 2120 | | 6784 | | 836 |

[0698] The neutralization titers of individual animals for Toxin B immunized at Month 0, 6 are show in FIG. 3 and GMTs are provided in Table 7. Toxoid antigens administered with either LiNA-2 or the CpG+Al(OH)₃ formulations on the Month 0, 6 schedule also elicited a robust and rapid functional immune response after 2 doses compared to 3 doses of the Al(OH)₃ formulated toxoid antigens. GMTs for Toxin A are provided in Table 8.

TABLE 7
Toxin B neutralizing titers for LiNA-2 and
CpG/Al(OH)₃ adjuvanted formulations (0.6M)

| | Toxin B concentration (Neutralizing units/mL) | | | | | |
|---|---|---|---|---|---|---|
| | Al(OH)₃ | | LiNA-2 | | CpG/Al(OH)₃ | |
| | 0/1/6 | | 0/6 | | 0/6 | |
| Months | GMT | 95% CI | GMT | 95% CI | GMT | 95% CI |
| 0 | 276 | 214- | 347 | 270- | 250 | 250- |
| | | 356 | | 445 | | 250 |
| 1 | 447 | 273- | 308 | 267- | 266 | 226- |
| | | 731 | | 354 | | 314 |
| 2 | 3016 | 1528- | 1081 | 454- | 477 | 182- |
| | | 5950 | | 2573 | | 1247 |
| 3 | 2847 | 1414- | 771 | 344- | Time point not measured | |
| | | 5735 | | 1728 | | |
| 4 | 2793 | 1229- | 661 | 259- | 469 | 214- |
| | | 6351 | | 1682 | | 1027 |
| 6 | 2774 | 1569- | 601 | 322- | 361 | 203- |
| | | 4905 | | 1120 | | 642 |
| 7 | 12421 | 6179- | 23186 | 12215- | 52074 | 20631- |
| | | 24969 | | 44009 | | 131439 |
| 12 | 9253 | 6552- | 17400 | 10587- | 10709 | 4756- |
| | | 13067 | | 28596 | | 24116 |

TABLE 8
Toxin A neutralizing titers for LiNA-2 and
CpG/Al(OH)₃ adjuvanted formulations (0.6M)

| | Toxin A concentration (Neutralizing units/mL) | | | | | |
|---|---|---|---|---|---|---|
| | Al(OH)₃ | | LiNA-2 | | CpG/Al(OH)₃ | |
| | 0/1/6 | | 0/6 | | 0/6 | |
| Months | GMT | 95% CI | GMT | 95% CI | GMT | 95% CI |
| 0 | 136 | 96- | 177 | 119- | 319 | 217- |
| | | 191 | | 263 | | 469 |
| 1 | 228 | 109- | 796 | 316- | 593 | 408- |
| | | 477 | | 2008 | | 864 |
| 2 | 2099 | 1135- | 962 | 567- | 726 | 545- |
| | | 3883 | | 1633 | | 968 |
| 3 | 927 | 393- | 979 | 456- | Time point not measured | |
| | | 2185 | | 2102 | | |
| 4 | 503 | 177- | 703 | 385- | 420 | 313- |
| | | 1430 | | 1286 | | 563 |
| 6 | 461 | 174- | 581 | 356- | 321 | 225- |
| | | 1218 | | 948 | | 457 |
| 7 | 2348 | 1486- | 18895 | 8332- | 5959 | 1709- |
| | | 3710 | | 42851 | | 20775 |
| 12 | 1097 | 568- | 4125 | 2933- | 1421 | 877- |
| | | 2120 | | 5801 | | 2303 |

### Example 3—Immunogenicity of C. difficile Vaccine Antigens Formulated with Different Dosage Strengths of CpG Adjuvant+Al(OH)₃ Administered at Month 0, 6

[0699] The relative immunogenicity of C. difficile toxoid antigens formulated with two levels of CpG adjuvant (CpG 24555) combined with Al(OH)₃ were compared to formulations with Al(OH)₃ in NHPs. The toxin neutralization assay described in Example 1 was used to measure the functional cytotoxic activity of sera at multiple time points following immunization. The geometric mean concentrations (GMTs) with 95% confidence intervals (CI) are provided for each C. difficile toxoid antigen.

[0700] Rhesus macaques were immunized IM with Txd A and Txd B according to the study design in Table 9. Group 1 received 3 doses (Month 0, 1, 6) of the C. difficile vaccine antigens formulated with Al(OH)₃. Groups 2 and 3 received two doses (Month 0, 6) of the C. difficile vaccine antigens formulated with either 0.5 mg/mL CpG+1 mg/mL Al(OH)₃ or 1 mg/mL CpG+1 mg/mL Al(OH)₃, respectively.

TABLE 9
NHP study design with CpG/Al(OH)₃ adjuvanted formulations

| | Number NHPs | | | Dose | Dosing |
|---|---|---|---|---|---|
| Group | per group | Formulation | Composition (per dose) | Route | Schedule |
| 1 | 5 | Al(OH)₃ | 10 μg of each Txd A&B | 0.5 mL | Month |
| | | | 0.5 mg Al(OH)₃ | IM | 0, 1, 6 |
| 2 | 5 | CpG/Al(OH)₃ | 10 μg of each Txd A&B | 0.5 mL | Month |
| | | | 0.25 mg CpG | IM | 0, 6 |
| | | | 0.5 mg Al(OH)₃ | | |
| 3 | 5 | CpG/Al(OH)₃ | 10 μg of each Txd A&B | 0.5 mL | Month |
| | | | 0.5 mg CpG | IM | 0, 6 |
| | | | 0.5 mg Al(OH)3 | | |

[0701] Sera were collected at multiple time points and the ability to neutralize toxin cytotoxic activity was measured in TNAs. The neutralization titers of individual animals for Toxin B are shown in FIG. 4 and GMTs are provided in Table 10, and illustrate that both of the CpG+Al(OH)₃ formulations elicited robust and rapid immune responses able to neutralize Toxin B cytotoxicity after just 2 doses. GMTs for Toxin A are provided in Table 11.

TABLE 10
Toxin B neutralizing titers for CpG/Al(OH)₃ adjuvanted formulations

| | Toxin B concentration (Neutralizing units/mL) | | | | | |
|---|---|---|---|---|---|---|
| | | | 0.5 mg/mL CpG | | 1 mg/mL CpG | |
| | Al(OH)₃ | | 1 mg/mL Al(OH)3 | | 1 mg/mL Al(OH)₃ | |
| | 0/1/6 | | 0/6 | | 0/6 | |
| Months | GMT | 95% CI | GMT | 95% CI | GMT | 95% CI |
| 0 | 278 | 225- | 411 | 229- | 250 | 250- |
| | | 343 | | 738 | | 250 |
| 1 | 250 | 249- | 292 | 232- | 266 | 226- |
| | | 251 | | 369 | | 314 |
| 2 | 858 | 503- | 447 | 224- | 477 | 182- |
| | | 1463 | | 890 | | 1247 |
| 3 | Time point not measured | | Time point not measured | | Time point not measured | |
| 4 | 993 | 306- | 409 | 211- | 469 | 214- |
| | | 3228 | | 793 | | 1027 |
| 6 | 1213 | 592- | 591 | 321- | 361 | 203- |
| | | 2485 | | 1090 | | 642 |
| 7 | 12770 | 3284- | 18184 | 6265- | 52074 | 20631- |
| | | 49655 | | 52777 | | 131439 |
| 8 | 8855 | 5087- | 12154 | 5024- | 23807 | 7582- |
| | | 15416 | | 29404 | | 74750 |
| 12 | 2998 | 1977- | 7942 | 4577- | 10709 | 4756- |
| | | 4545 | | 13780 | | 24116 |

TABLE 11
Toxin A neutralizing titers for CpG/Al(OH)₃ adjuvanted formulations

| | Toxin A concentration (Neutralizing units/mL) | | | | | |
|---|---|---|---|---|---|---|
| | | | 0.5 mg/mL CpG | | 1 mg/mL CpG | |
| | Al(OH)₃ | | 1 mg/mL Al(OH)3 | | 1 mg/mL Al(OH)₃ | |
| | 0/1/6 | | 0/6 | | 0/6 | |
| Months | GMT | 95% CI | GMT | 95% CI | GMT | 95% CI |
| 0 | 416 | 391- | 334 | 214- | 319 | 217- |
| | | 443 | | 524 | | 469 |
| 1 | 217 | 134- | 462 | 310- | 593 | 408- |
| | | 349 | | 689 | | 864 |
| 2 | 706 | 550- | 512 | 428- | 726 | 545- |
| | | 905 | | 613 | | 968 |
| 3 | Time point not measured | | Time point not measured | | Time point not measured | |
| 4 | 353 | 227- | 236 | 176- | 420 | 313- |
| | | 548 | | 318 | | 563 |
| 6 | 297 | 211- | 316 | 208- | 321 | 225- |
| | | 419 | | 481 | | 457 |
| 7 | 1233 | 530- | 4226 | 1392- | 5959 | 1709- |
| | | 2870 | | 12830 | | 20775 |
| 8 | 1417 | 584- | 3874 | 1902- | 3623 | 1674- |
| | | 3438 | | 7891 | | 7841 |
| 12 | 355 | 249- | 1720 | 898- | 1421 | 877- |
| | | 506 | | 3296 | | 2303 |

### Example 4—Immunogenicity of C. difficile Vaccine Antigens Formulated with Different Dosage Strengths of CpG Adjuvant Alone or CpG Adjuvant+Al(OH)₃ Administered at Month 0, 2

[0702] The relative immunogenicity of C. difficile toxoid antigens formulated with CpG (CpG 24555) alone or CpG 24555 combined with Al(OH)₃ at different levels of the CpG adjuvant were compared to formulations with Al(OH)₃ in NHPs. The toxin neutralization assay described in Example 1 was used to measure the functional cytotoxic activity of sera at multiple time points following immunization. The geometric mean concentrations (GMTs) with 95% confidence intervals (CI) are provided for each C. difficile toxoid antigen.

[0703] Rhesus macaques were immunized IM with Txd A and Txd B according to the study design in Table 12. Group 1 received C. difficile vaccine antigens formulated with Al(OH)₃, at Month 0, 1, 6. Groups 2, 3 and 4 received 2 doses (Month 0, 2) of vaccine formulated with CpG+Al(OH)₃, with CpG adjuvant included at 0.5, 1.0 or 3.6 mg/mL, respectively, and 1 mg/mL Al(OH)₃. Groups 5 and 6 received 2 doses (Month 0, 2) of vaccine formulated with CpG alone, either at 0.5 or 3.6 mg/mL CpG, respectively.

TABLE 12
NHP study design with CpG/Al(OH)₃ or CpG alone adjuvanted formulations

| | Number NHPs | | | Dose | Dosing |
|---|---|---|---|---|---|
| Group | per group | Formulation | Composition (per dose) | Route | Schedule |
| 1 | 5 | Al(OH)₃ | 10 μg of each Txd A&B | 0.5 mL | Month |
| | | | 0.5 mg Al(OH)₃ | IM | 0, 1, 6 |
| 2 | 5 | CpG/Al(OH)₃ | 10 μg of each Txd A&B | 0.5 mL | Month |
| | | | 0.25 mg CpG | IM | 0, 2 |
| | | | 0.5 mg Al(OH)₃ | | |
| 3 | 5 | CpG/Al(OH)₃ | 10 μg of each Txd A&B | 0.5 mL | Month |
| | | | 0.5 mg CpG | IM | 0, 2 |
| | | | 0.5 mg Al(OH)₃ | | |
| 4 | 5 | CpG/Al(OH)₃ | 10 μg of each Txd A&B | 0.5 mL | Month |
| | | | 1.8 mg CpG | IM | 0, 2 |
| | | | 0.5 mg Al(OH)₃ | | |
| 5 | 4 | CpG Alone | 10 μg of each Txd A&B | 0.5 mL | Month |
| | | | 0.25 mg CpG | IM | 0, 2 |
| 6 | 5 | CpG Alone | 10 μg of each Txd A&B | 0.5 mL | Month |
| | | | 1.8 mg CpG | IM | 0, 2 |

[0704] Sera were collected at multiple time points and the ability to neutralize toxin cytotoxic activity was measured in TNAs. The neutralization titers of individual animals for Toxin B are shown in FIG. 5 and GMTs are provided in Tables 13-14. The TNA response to the toxoid antigens formulated with the combination of CpG+Al(OH)₃ revealed a CpG dose response (Groups 2-4). The TNA response measured in sera collected from NHPs immunized with toxoids formulated with 1.0 or 3.6 mg/mL CpG+Al(OH)₃ groups (Groups 3 and 4) were substantially higher than the response measured in sera from the 0.5 mg/mL CpG+1 mg/mL Al(OH)₃ group (Group 2). Toxoid antigens formulated with either level of CpG alone (without of Al(OH)₃) (Groups 5 and 6) also elicited strong TNA responses in NHPs. GMTs for Toxin A are provided in Tables 15-16.

TABLE 13
Toxin B neutralizing titers CpG/Al(OH)₃ adjuvanted formulations

| | Toxin B concentration (Neutralizing units/mL) | | | | | | | |
|---|---|---|---|---|---|---|---|---|
| | | | 0.5 mg/mL CpG | | 1 mg/mL CpG | | 3.6 mg/mL CpG | |
| | Al(OH)₃ | | 1 mg/mL Al(OH)3 | | 1 mg/mL Al(OH)₃ | | 1 mg/mL Al(OH)₃ | |
| | 0/1/6 | | 0/2 | | 0/2 | | 0/2 | |
| Months | GMT | 95% CI | GMT | 95% CI | GMT | 95% CI | GMT | 95% CI |
| 0 | 278 | 225- | 322 | 213- | 250 | 250- | 423 | 266- |
| | | 343 | | 489 | | 250 | | 674 |
| 1 | 250 | 249- | 282 | 242- | 279 | 244- | 395 | 258- |
| | | 251 | | 330 | | 318 | | 605 |
| 2 | 858 | 503- | 347 | 222- | 682 | 354- | 304 | 241- |
| | | 1463 | | 544 | | 1313 | | 384 |
| 3 | Not measured | | Not measured | | Not measured | | Not measured | |
| 4 | 993 | 306- | 4563 | 1261- | 14586 | 8791- | 19012 | 7499- |
| | | 3228 | | 16509 | | 24201 | | 48202 |
| 6 | 1213 | 592- | 3380 | 989- | 15058 | 7104- | 8310 | 2802- |
| | | 2485 | | 11553 | | 31916 | | 24645 |
| 7 | 12770 | 3284- | 5518 | 714- | 12666 | 6889- | 16056 | 4297- |
| | | 49655 | | 42664 | | 23290 | | 59996 |

TABLE 14
Toxin B neutralizing titers for CpG alone adjuvanted formulations
Toxin B concentration (Neutralizing units/mL)

| 0.5 mg/mL CpG | 3.6 mg/mL CpG |
|---|---|
| 0/2 | 0/2 |

| Months | GMT | 95% CI | GMT | 95% CI |
|---|---|---|---|---|
| 0 | 254 | 240-270 | 302 | 185-494 |
| 1 | 304 | 162-571 | 441 | 296-656 |
| 2 | 417 | 127-1370 | 485 | 229-1030 |

| | | |
|---|---|---|
| 3 | Not measured | Not measured |

| | | | | |
|---|---|---|---|---|
| 4 | 13104 | 4908-34989 | 34763 | 16982-71159 |
| 6 | 5466 | 1540-19394 | 11362 | 8045-16046 |
| 7 | 5104 | 2656-9811 | 10027 | 6968-14430 |

TABLE 15
Toxin A neutralizing titers CpG/Al(OH)₃ adjuvanted formulations

| | Toxin A concentration (Neutralizing units/mL) | | | | | | | |
|---|---|---|---|---|---|---|---|---|
| | | | 0.5 mg/mL CpG | | 1 mg/mL CpG | | 3.6 mg/mL CpG | |
| | Al(OH)₃ | | 1 mg/mL Al(OH)3 | | 1 mg/mL Al(OH)₃ | | 1 mg/mL Al(OH)₃ | |
| | 0/1/6 | | 0/2 | | 0/2 | | 0/2 | |
| Months | GMT | 95% CI | GMT | 95% CI | GMT | 95% CI | GMT | 95% CI |
| 0 | 416 | 391- | 377 | 259- | 307 | 211- | 447 | 415- |
| | | 443 | | 547 | | 447 | | 482 |
| 1 | 217 | 134- | 448 | 239- | 453 | 293- | 818 | 494- |
| | | 349 | | 838 | | 701 | | 1355 |
| 2 | 706 | 550- | 491 | 287- | 695 | 580- | 566 | 303- |
| | | 905 | | 841 | | 833 | | 1058 |
| 3 | Not measured | | Not measured | | Not measured | | Not measured | |
| 4 | 353 | 227- | 1520 | 790- | 1896 | 1544- | 2292 | 1502- |
| | | 548 | | 2926 | | 2328 | | 3497 |
| 6 | 297 | 211- | 719 | 206- | 1136 | 762- | 1634 | 852- |
| | | 419 | | 2510 | | 1693 | | 3133 |
| 7 | 1233 | 530- | 420 | 229- | 891 | 566- | 2750 | 1225- |
| | | 2870 | | 771 | | 1405 | | 6174 |

TABLE 16
Toxin A neutralizing titers for CpG alone adjuvanted formulations
Toxin A concentration (Neutralizing units/mL)

| 0.5 mg/mL CpG | 3.6 mg/mL Cp |
|---|---|
| 0/2 | 0/2 |

| Months | GMT | 95% CI | GMT | 95% CI |
|---|---|---|---|---|
| 0 | 441 | 422-460 | 417 | 350-498 |
| 1 | 462 | 237-899 | 617 | 464-821 |
| 2 | 214 | 164-279 | 228 | 137-377 |

| | | |
|---|---|---|
| 3 | Not measured | Not measured |

| | | | | |
|---|---|---|---|---|
| 4 | 841 | 492-1435 | 1659 | 729-3777 |
| 6 | 561 | 233-1347 | 423 | 215-835 |
| 7 | 404 | 202-807 | 640 | 394-1037 |

### Example 5—Immunogenicity of C. difficile Vaccine Antigens Formulated with Different Saponin Containing Liposomal Adjuvants

[0705] The relative immunogenicity of C. difficile toxoid antigens formulated with aluminum hydroxide (Al(OH)₃) and different saponin containing liposomal adjuvant (LiNA-2) formulations (e.g. homogeneous and heterogeneous) was compared in rats. Homogeneous and heterogeneous LiNA-2 adjuvants are described herein and in Table 17. Final rat LiNA-2 adjuvant doses were prepared by diluting 1× concentration of LiNA-2 at a 1:5 dilution using PBS buffer at pH 6.2.

TABLE 17
LiNA-2 adjuvant formulation

| | LiNA-2 homogenous | LiNA-2 heterogenous |
|---|---|---|
| Components | (1X, mg/mL) | (1X, mg/mL) |
| 3D-PHAD ® | 0.4 | 0.4 |
| QS-21 | 0.2 | 0.2 |
| DMPC | 14 | 14 |
| DMPG | 1.58 | 1.58 |
| Cholesterol | 10.82 | 10.82 |

All in 10 mM Phosphate, 150 mM NaCl solution at pH 6.2

[0706] The toxin neutralization assay described in Example 1 was used to measure the functional cytotoxic activity of sera at multiple time points following immunization.

[0707] Wistar Han rats (10 per Group, 8-10 weeks old, Charles River Laboratories) were immunized IM according to the study design in Table 18. Group 1 received C. difficile vaccine antigens formulated with Al(OH)₃. Groups 2 and 3 received the C. difficile vaccine antigens formulated with the homogeneous and heterogeneous LUNA-2 adjuvant, respectively.

[0708] Sera were collected at multiple time points and the ability to neutralize toxin cytotoxic activity was measured in TNAs. Neutralization titers in sera from individual animals for Toxin B are shown in FIG. 6 and illustrate that toxoids formulated with homogeneous and heterogeneous LUNA-2 elicited similar immune responses able to neutralize Toxin B cytotoxicity.

TABLE 18
Rat study design with LiNA-2 adjuvanted formulations

| | | | Dose | | |
|---|---|---|---|---|---|
| | | Composition | Vol | Dosing | Assay |
| Group | Formulation | (per dose, mg/mL) | Route | Schedule | Schedule |
| 1 | Al(OH)₃ | 0.04 mg of each Txd A&B | 250 μl | Week | Week |
| | | 0.4 mg Al(OH)₃ | IM | 0, 4, 8 | 0, 2, 6, 10 |
| 2 | LiNA-2 | 0.04 mg of each Txd A&B | 250 μl | Week | Week |
| | Homogeneous | 0.08 mg 3D-PHAD ® | IM | 0, 4, 8 | 0, 2, 6, 10 |
| | | 0.04 mg QS-21 | | | |
| | | 2.8 mg DMPC | | | |
| | | 0.316 mg DMPG | | | |
| | | 2.16 mg Cholesterol | | | |
| 3 | LiNA-2 | 0.04 mg of each Txd A&B | 250 μl | Week | Week |
| | Heterogeneous | 0.08 mg 3D-PHAD ® | IM | 0, 4, 8 | 0, 2, 6, 10 |
| | | 0.04 mg QS-21 | | | |
| | | 2.8 mg DMPC | | | |
| | | 0.316 mg DMPG | | | |
| | | 2.16 mg Cholesterol | | | |

### Example 6—Determination of Ratio and Concentrations of CpG/Al(OH)₃

[0709] Binding studies with various CpG and Al(OH)₃ concentrations and ratios were performed to understand the binding properties of the C. difficile toxoids and CpG 24555 (referred to as “CpG” herein). Formulation parameters affecting the binding of both CpG and the antigens to Al, such as CpG concentration and Al(OH)₃ concentration were investigated. C. difficile drug product for the binding studies was formulated and lyophilized at a concentration of 0.4 mg/mL (200 μg/mL of Toxoid A and 200 μg/mL of Toxoid B) in 10 mM Tris, 4.5% (w/v) trehalose dihydrate, 0.01% (w/v) polysorbate 80, pH 7.4 and reconstituted with the CpG/Al(OH)₃ formulations. The CpG/Al(OH)₃ was formulated as a liquid in 10 mM histidine, 60 mM NaCl, pH 6.5.

[0710] UV Spectroscopy method was used to determine the total and bound CpG concentration in CpG/Al(OH)₃ suspension samples. Bound CpG concentration is the amount of CpG associated with Al(OH)₃. Standard optical density at 260 nm was measured to calculate the concentration of oligonucleotides in the sample using Beer-Lambert equation with a theoretical absorptivity constant of CpG (absorptivity constant of CpG at 260 nm is 38.19 mg·L⁻¹·cm). Total oligonucleotide concentration was measured after dissociating CpG from Al(OH)₃. Unbound oligonucleotide concentration was measured by analysis of the supernatant after centrifugation of CpG/Al(OH)₃ suspension to precipitate the particles. The concentration of bound CpG was determined by subtracting the unbound CpG concentration from the total CpG concentration. % bound CpG to Al(OH)₃ is percent bound CpG concentration in total CpG concentration.

[0711] To determine % bound toxoid, TxdA and TxdB were separated by anion-exchange chromatography, detected by ultraviolet detection and subsequently quantitated by comparing the peak response of the protein of interest against the response of a reference material of known concentration. Total toxoid concentration was measured after reconstituting a vial of lyophilized C. difficile drug product with saline. Unbound toxoid concentration was measured after reconstituting a vial of lyophilized C. difficile drug product with CpG/Al(OH)₃ by analysis of the supernatant after centrifugation of C. difficile drug product+CpG/Al(OH)₃ suspension to precipitate the particles. The concentration of bound toxoid was determined by subtracting the unbound toxoid concentration from the total toxoid concentration. % bound toxoid to Al(OH)₃ is percent bound toxoid concentration in total toxoid concentration.

[0712] Three aluminum levels: 0.85 mg, 1.0 mg and 1.25 mg per 0.5 mL dose were assessed. At each aluminum concentration, different concentrations of CpG were prepared with Al(OH)₃ as shown in Table 19. The prepared CpG/Al(OH)₃ adjuvants were used to reconstitute the lyophilized C. difficile toxoids to reach 400 μg/mL of total toxoids after reconstitution. Table 19 shows full toxoids binding was achieved at a CpG/Al(OH)₃ concentration greater than 1.4/1.7 mg/mL, 1.6/2.0 mg/mL, and 2.0/2.5 mg/mL, respectively.

TABLE 19
% C. difficile binding with varying CpG/Al(OH)3 ratios

| | Reconstituted C. difficile Lyo Drug Product | |
|---|---|---|
| | (TxdA + TxdB at 400 μg/mL) | |
| | % Bound total | % Bound |
| CpG/Al(OH)3 (mg/mL) | Toxoids (A + B)^{a} | CpG |
| At Al(OH)₃ level 1.7 | | |
| 1.2/1.7 | >98% | >99.0% |
| 1.3/1.7 | >98% | >99.1% |
| 1.4/1.7 | >98% | >99.2% |
| 1.5/1.7 | 87% | >99.2% |
| 1.6/1.7 | 77% | >99.3% |
| At Al(OH)₃ level 2.0 | | |
| 1.5/2.0 | >98% | >99.3% |
| 1.6/2.0 | >98% | >99.3% |
| 1.7/2.0 | 94% | >99.4% |
| 1.8/2.0 | 81% | >99.4% |
| 1.9/2.0 | 82% | >99.4% |
| At Al(OH)₃ level 2.5 | | |
| 1.8/2.5 | >98% | >99.4% |
| 1.9/2.5 | >98% | >99.4% |
| 2.0/2.5 | >98% | >99.5% |
| 2.1/2.5 | 96% | >99.5% |
| 2.2/2.5 | 90% | >99.5% |
| 2.4/2.5 | 82% | >99.5% |

^{a}The preliminary LOQ of the assay was 2%

[0713] Based on the results in Table 19, the relationship between the % toxoids binding to the mass ratio of the Al(OH)₃/CpG was summarized and plotted in FIG. 7. The toxoids binding to aluminum increased with the increased mass ratio of Al(OH)₃/CpG. Full binding of toxoids to aluminum was achieved when the mass ratio of the Al(OH)₃/CpG was ≥1.21, providing an estimate of the maximum CpG allowed in the formulation with a fixed amount of Al(OH)₃ to achieve complete binding of C. difficile toxoids.

### Example 7—Formulation Development of CpG/Al(OH)₃

[0714] Binding and resuspension studies were performed for various CpG/Al(OH)₃ formulations: low dose formulations of 1.0/1.5 mg/mL CpG/Al(OH)₃ and 1.2/1.8 mg/mL CpG/Al(OH)₃, and a high dose formulation of 3.6/1.8 mg/mL CpG/Al(OH)₃, see Tables 20 and 21. C. difficile drug product for the binding studies was formulated and lyophilized at a concentration of 200 μg/mL of Toxoid A and 200 μg/mL of Toxoid B in 10 mM Tris, 4.5% (w/v) trehalose dihydrate, 0.01% (w/v) polysorbate 80, pH 7.4. CpG/Al(OH)₃ adjuvants were formulated as liquids and assessed.

[0715] The binding studies were performed as described above. The resuspension properties of formulations were studied by filling each CpG/Al(OH)₃ adjuvant into 1 mL syringes with 0.75 mL fill volume and stoppered with ˜5±1 mm head space. Filled syringes were held horizontally at 5° C. until complete settling was achieved. The resuspension was monitored by counting the average number of shakes from three syringes required to achieve a homogeneous suspension based on visual observation.

[0716] Complete CpG binding and C. difficile toxoids binding after reconstitution was observed for various low dose formulations. Further, various formulations took less than five shakes to fully resuspend after initial settling in pre-filled syringes placed in a horizontal orientation, indicating no resuspension concerns. For the high dose formulations various buffer components and NaCl amounts were assessed to improve resuspension and binding.

TABLE 20
CpG/Al(OH)₃ formulations

| CpG/ | | | | CpG | Txds | |
|---|---|---|---|---|---|---|
| Al(OH)₃ | Buffer | NaCl | | Binding | Binding (%) | # Shakes |
| (mg/mL) | (mM) | (mM) | pH | (%) | Total (A + B) | in PFS |
| 1.0/1.5 | 10 | 50 | 6.5 | >98.9 | TxdA: >98 | <5 |
| | Histidine | | | | TxdB: >98 | |
| | | | | | Total Txds 98 | |
| 3.6/1.8 | 10 | 60 | 6.5 | 55.4 | TxdA: >98 | 20 |
| | Histidine | | | | TxdB: 22 | |
| | | | | | Total Txds: 60 | |
| 3.6/1.8 | 10 | 200 | 6.5 | 57.8 | Not tested | 12 |
| | Histidine | | | | | |
| 3.6/1.8 | 25 | 150 | 6.5 | 21.5 | TxdA: 89 | <5 |
| | Phosphate | | | | TxdB: 3 | |
| | | | | | Total Txds: 46 | |
| 3.6/1.8 | 20 | 150 | 6.5 | 24.7 | TxdA: 82 | <5 |
| | Phosphate | | | | TxdB: 6 | |
| | | | | | Total Txds: 44 | |
| 3.6/1.8 | 20 | 60 | 6.5 | 24.1% | TxdA: 97 | <5 |
| | Phosphate | | | | TxdB: 6 | |
| | | | | | Total Txds: 51.5 | |
| 3.6/1.8 | 25 | 80 | 7.0 | 19.0% | TxdA: 87 | <5 |
| | Phosphate | | | | TxdB: 0 | |
| | | | | | Total Txds: 43.5 | |
| 3.6/1.8 | 15 | 40 | 6.0 | 28.4% | TxdA: > 98 | <5 |
| | Phosphate | | | | TxdB: 13 | |
| | | | | | Total Txds: 55.5 | |

TABLE 21
CpG/Al(OH)₃ formulations

| CpG/ | | | | | | |
|---|---|---|---|---|---|---|
| Al(OH)₃ | | | | | | # Shakes |
| Conc. | Buffer | NaCl | | CpG | Txds | Resuspension |
| (mg/mL) | (mM) | (mM) | pH | Binding (%) | Binding (%) | in vials and PFS |
| 1.2/1.8 | 10 | 60 | 6.5 | >99.1 | TxdA: >98 | <5 |
| | Histidine | | | | TxdB: >98 | |
| 1.2/1.8 | 20 | 150 | 6.5 | 66.4 | TxdA: 94 | <5 |
| | Phosphate | | | | TxdB: 9 | |
| 1.2/1.8 | 20 | 60 | 6.5 | 59.7 | TxdA: >98 | <5 |
| | Phosphate | | | | TxdB: 5 | |
| 1.2/1.8 | 10 | 60 | 6.5 | 71.4 | Txd A: >98 | <5 |
| | Phosphate | | | | Txd B: 7 | |

### Example 8—A Phase 1 Randomized and Phase 2 Study to Evaluate the Safety, Tolerability, Immunogenicity, and Immunopersistence of a Clostridioides difficile Vaccine Administered in a 2-Dose Regimen with Novel Adjuvants in Healthy Adults

[0717] This Phase 1/2 study in adults ≥50 to <85 years of age evaluates the safety and immunogenicity of various C. difficile vaccine formulations. It assess whether adjuvanted formulations show a similar safety profile with improved immunogenicity (more rapid rise in protective antibodies with maintained durability) in a 2-dose regimen when compared to the current Al(OH)₃-containing vaccine formulation in a 3-dose regimen.

### Phase 1

[0718] Phase 1 identifies the preferred adjuvant(s) and dosing schedule. Using a parallel-group design, approximately 140 healthy adults ≥65 to <85 years of age will be randomized equally to 1 of 7 groups (20 participants per group) and will receive the C. difficile vaccine administered with 1 of 3 novel formulations on a 0- and 2-month or 0- and 6-month dosing schedule, or the C. difficile vaccine administered in the current Al(OH)₃-containing formulation (control) on a 0-, 1-, and 6-month dosing schedule. Blood will be collected from all participants at screening and at Visits 1 through 7 for safety laboratory assessments. Additional blood will be collected from all participants at Visits 1 and 3 through 8 for immunogenicity assessments. Participants will be followed for safety through 6 months after the last study injection (Visit 8). The groups will receive one of the following C. difficile vaccine: investigational C. difficile vaccine+low-dose CpG+Al(OH)₃ at 0-2 Months or 0-6 Month; investigational C. difficile vaccine+high-dose CpG only at 0-2 Months or 0-6 Months; investigational C. difficile vaccine+LiNA-2 at 0-2 Months or 0-6 Months; or investigational C. difficile vaccine+Al(OH)₃ only at 0-1-6 Months (current formulation; control)

### Phase 2

[0719] Based on safety and immunogenicity data collected during Phase 1, 1 or 2 adjuvant(s) and the corresponding dosing schedule will be selected to proceed into Phase 2. If 1 adjuvant is selected, Phase 2 will enroll a total of approximately 215 healthy adults, with approximately 50 participants ≥50 to <65 years of age and approximately 165 participants ≥65 to <85 years of age. All participants will receive 2 doses of the adjuvanted C. difficile vaccine on the same dosing schedule (0- and 2-month or 0- and 6-month) in an open-label manner. In the event that 2 adjuvant formulations are selected after Phase 1, an additional vaccine group consisting of 215 participants (50 participants ≥50 to <65 years of age and 165 participants ≥65 to <85 years of age) will be added for the second adjuvant formulation, and participants will be randomized equally to 1 of 2 vaccine groups that will receive the C. difficile vaccine formulated with 1 of the 2 selected adjuvants.

[0720] Participants will be followed for safety through 6 months after the last vaccination and for antibody persistence for up to 4 years after the last vaccination. Blood will be collected from all participants at Visits 1, 2, and 4 through 9 for immunogenicity assessments.

### Study Arms and Duration:

[0721] The study is conducted in 2 phases. Participants in Phase 1 take part in the study for approximately 12 months. Participants in Phase 2 take part in the study for up to approximately 4.5 years (2- to 6-month vaccination period, 6-month safety follow-up period, and up to 3.5 years of antibody persistence follow-up).

### Phase 1 Objectives

### Primary

[0722] To describe the safety profile of the C. difficile vaccine when administered in a 2-dose regimen with novel adjuvants in healthy adults
   [0723] Endpoints: Local reactions (injection site pain, redness, and swelling); Systemic events (fever, vomiting, diarrhea, headache, fatigue, new or worsening muscle pain, and new or worsening joint pain); adverse events (AEs); serious adverse events (SAEs); medically attended adverse events (MAAEs)
[0724] To further describe the safety profile of the C. difficile vaccine when administered in a 2-dose regimen with novel adjuvants in healthy adults
   [0725] Endpoints: Hematology and chemistry laboratory parameters

### Secondary

[0726] To describe the immune responses elicited by the C. difficile vaccine when administered in a 2-dose regimen with novel adjuvants in healthy adults
   [0727] Endpoints: C. difficile TNA (toxin A- and toxin B-specific neutralizing antibody) concentrations
   [0728] Estimands: In evaluable participants: GMCs (geometric mean concentration) at each planned postvaccination time point, and GMFRs (geometric mean fold rise) from before vaccination at each postvaccination time point
[0729] To describe the safety profile of the C. difficile vaccine when administered in a 2-dose regimen with novel adjuvants in healthy adults
   [0730] Endpoints: SAEs and medically attended adverse events from 6 month through 12 months after the last dose

### Phase 2 Objectives

### Primary

[0731] To describe the safety profile of the C. difficile vaccine when administered in the selected 2-dose regimen with the selected novel adjuvant(s) in healthy adults
   [0732] Endpoints: Local reactions (injection site pain, redness, and swelling); Systemic events (fever, vomiting, diarrhea, headache, fatigue, new or worsening muscle pain, and new or worsening joint pain); adverse events (AEs); serious adverse events (SAEs); medically attended adverse events (MAAEs)
[0733] To describe the immune response to the C. difficile vaccine when administered in the selected 2-dose regimen with the selected novel adjuvant(s) in healthy adults
   [0734] Endpoints: C. difficile TNA concentrations
   [0735] Estimands: In evaluable participants: GMCs at 1 month after the last dose; GMFRs from before vaccination to 1 month after the last dose

### Secondary

[0736] To further describe the immune response to the C. difficile vaccine when administered in the selected 2-dose regimen with the selected novel adjuvant(s) in healthy adults
   [0737] Endpoints: C. difficile TNA concentrations
   [0738] Estimands: In evaluable participants: GMCs at 1 month after the first dose and 6 months after the last dose; GMFRs from before vaccination to 1 month after the first dose and 6 months after the last dose; the proportion of participants with a ≥4-fold rise in TNA concentrations from before vaccination to 1 month after the last dose
[0739] To describe the persistence of the immune response to the C. difficile vaccine when administered in the selected 2-dose regimen with the selected novel adjuvant(s) in healthy adults
   [0740] Endpoints: C. difficile TNA concentrations
   [0741] Estimands: In evaluable participants: GMCs at each planned persistence time point (1, 2, 3, and 4 years after the last dose); GMFRs from before vaccination to each planned persistence time point (from before vaccination to 1, 2, 3, and 4 years after the last dose)
[0742] To describe the safety profile of the C. difficile vaccine when administered in a 2-dose regimen with novel adjuvants in healthy adults
   [0743] Endpoints: SAEs and medically attended adverse events from 6 month through 12 months after the last dose

1. A immunogenic composition comprising a Clostridioides difficile (C. difficile) toxoid A and/or toxoid B, and a CpG adjuvant comprising at least one CpG or a saponin containing liposomal adjuvant.

2. (canceled)

3. The immunogenic composition of claim 1, wherein the CpG adjuvant comprises a B class CpG.

4. The immunogenic composition of claim 1, wherein the CpG adjuvant comprises CpG 24555 (SEQ ID NO: 48).

5. The immunogenic composition of claim 1, comprising about 0.1 to 5 mg/mL or higher, about 0.1 to about 1.0 mg/mL, about 0.5 to about 1.5 mg/mL, about 0.8 to about 1.8 mg/mL, or about 3.0 to about 4.0 mg/mL CpG.

6. The immunogenic composition of claim 1, comprising about 0.5 mg/mL, about 1.0 mg/mL, about 1.2 mg/mL, or about 3.6 mg/mL CpG.

7. The immunogenic composition of claim 1, comprising about 3.6 mg/mL CpG.

8. The immunogenic composition of claim 1, wherein the CpG adjuvant further comprises an additional adjuvant.

9. The immunogenic composition of claim 1, wherein the CpG adjuvant further comprises an aluminum salt selected from aluminum phosphate, aluminum sulfate and aluminum hydroxide (Al(OH)₃).

10. (canceled)

11. The immunogenic composition of claim 1, comprising a CpG and about 0.1 to 5 mg/mL, about 0.5 to about 1.5 mg/mL, or about 1.0 to about 2.5 mg/mL Al(OH)₃.

12. The immunogenic composition of claim 1, comprising a CpG and about 1.0, about 1.5, about 1.7, about 1.8, about 2.0, or about 2.5 Al(OH)₃.

13. The immunogenic composition of claim 1, comprising about 0.5 to about 3.6 mg/mL CpG and about 0.1 to 5 mg/mL Al(OH)₃.

14. The immunogenic composition of claim 1, comprising:
about 1.0 mg/mL CpG and about 1.5 mg/mL Al(OH)₃;
about 1.2, 1.3, 1.4, 1.5, or 1.6 mg/mL CpG and about 1.7 mg/mL Al(OH)₃;
about 1.5, 1.6, 1.7, 1.8, or 1.9 mg/mL CpG and about 2.0 mg/mL Al(OH)₃;
about 1.8, 1.9, 2.0, 2.1, 2.2, or 2.4 mg/mL CpG and about 2.5 mg/mL Al(OH)₃;
about 3.6 mg/mL CpG and about 1.8 mg/mL Al(OH)₃;
about 1.4 mg/mL CpG and about 1.7 mg/mL or higher Al(OH)₃;
about 1.6 mg/mL CpG and about 2.0 mg/mL or higher Al(OH)₃; or
about 2.0 mg/mL CpG and about 2.5 mg/mL or higher Al(OH)₃.

15. The immunogenic composition of claim 1,
comprising a mass ratio of CpG/Al(OH)₃ of about 1.21 or higher.

16. The immunogenic composition of claim 1, wherein the CpG adjuvant comprises a histidine or phosphate buffer.

17. The immunogenic composition of claim 16, wherein the histidine or phosphate buffer is at a concentration of about 5 mM to 15 mM, or preferably about 10 mM.

18. The immunogenic composition of claim 1, wherein the CpG adjuvant comprises sodium chloride.

19. The immunogenic composition of claim 18, wherein the sodium chloride is at a concentration of about 20 mM to 100 mM, or preferably about 50 mM or about 60 mM.

20. The immunogenic composition of claim 1, wherein the CpG adjuvant has a pH of about 6.0 to 7.0, or preferably about 6.5.

21. The immunogenic composition of claim 1, wherein the CpG adjuvant comprises about 3.6 mg/mL CpG 24555.

22. The immunogenic composition of claim 1, wherein the CpG adjuvant comprises about 1.0 mg/mL CpG 24555 and about 1.5 mg/mL of Al(OH)₃.

23. The immunogenic composition of claim 1, wherein the saponin containing liposomal adjuvant comprises a saponin and a monophosphoryl lipid A (MPLA)-containing liposome composition, wherein the liposome composition comprises i) a lipid bilayer comprising phospholipids and ii) cholesterol.

24. The immunogenic composition of claim 23, wherein the saponin is selected from QS-7, QS-18, QS-21, or a mixture thereof.

25. (canceled)

26. The immunogenic composition of claim 23, wherein the phospholipid is selected from dimyristoyl phosphatidylcholine (DMPC), dipalmitoyl phosphatidylcholine (DPPC), distearyl phosphatidylcholine (DSPC), dimyristoyl phosphatidylglycerol (DMPG), dipalmitoyl phosphatidylglycerol (DPPG), and distearyl phosphatidylglycerol (DSPG).

27. (canceled)

28. The immunogenic composition of claim 1, wherein the saponin containing liposomal adjuvant comprises QS-21, Monophosphoryl Lipid A (MPLA), DMPC, DMPG and cholesterol.

29. (canceled)

30. The immunogenic composition of claim 1, comprising:
about 0.1 to about 0.4 mg/mL of QS-21, preferably about 0.2 mg/mL of QS-21;
about 0.2 to about 0.6 mg/mL of MPLA, preferably about 0.4 mg/mL of MPLA;
about 5 to about 15 mg/mL of cholesterol, preferably about 11 mg/mL of cholesterol;
about 5 to about 20 mg/mL of DMPC, preferably about 14 mg/mL of DMPC; and/or
about 1.0 to about 2.0 mg/mL of DMPG, preferably about 1.6 mg/mL of DMPG.

31. The immunogenic composition of claim 1, wherein the saponin containing liposomal adjuvant comprises a histidine or phosphate buffer.

32. The immunogenic composition of claim 31, wherein the phosphate buffer is at a concentration of about 5 mM to 15 mM, or preferably about 10 mM, and optionally, further comprises sodium chloride at a concentration of about 100 mM to 200 mM, or preferably about 150 mM.

33. (canceled)

34. The immunogenic composition of claim 1, wherein the saponin containing liposomal adjuvant has a pH of about 5.5 to 7.0, preferably about 6.2.

35. The immunogenic composition of claim 1, wherein the C. difficile toxoid A comprises the amino acid sequence of SEQ ID NO: 4, wherein the initial methionine is absent, and C. difficile toxoid B comprises the amino acid sequence of SEQ ID NO: 6, wherein the initial methionine is absent.

36. The immunogenic composition of claim 1, wherein the C. difficile toxoid A comprises the amino acid sequence of SEQ ID NO: 84, and C. difficile toxoid B comprises the amino acid sequence of SEQ ID NO: 86.

37. The immunogenic composition of claim 1, wherein the composition comprises the C. difficile toxoid A and the C. difficile toxoid B in a ratio of about 3:1 to about 1:1 and/or the composition comprises 200 ρq of toxoid per dose.

38. (canceled)

39. The immunogenic composition of claim 1, wherein the C. difficile toxoid A and toxoid B are lyophilized and reconstituted with a CpG adjuvant or a saponin containing liposomal adjuvant.

40. The immunogenic composition of claim 39, wherein the lyophilized C. difficile toxoid A and toxoid B are reconstituted with:
a CpG adjuvant comprising about 3.6 mg/mL CpG 24555,
a CpG adjuvant comprising about 1.0 mg/mL CpG 24555 and about 1.5 mq/mL Al(OH)₃; and/or
a saponin containing liposomal adjuvant comprising about 0.2 mq/mL QS-21, about 0.4 mg/mL Monophosphoryl 3-Deacyl Lipid A, about 14 mq/mL DMPC, about 1.6 mq/mL DMPG and about 11 mq/mL cholesterol.

41. (canceled)

42. (canceled)

43. The immunogenic composition of claim 1, wherein the composition is administered at a dose volume of 0.5 mL.

44. (canceled)

45. (canceled)

46. A method of eliciting an immune response in a human subject against C. difficile, the method comprising administering to the human subject an immunogenic composition of claim 1.

47. A method of preventing, treating or ameliorating an infection, disease or condition associated with C. difficile in a human subject, the method comprising administering to the human subject an immunogenic composition of claim 1.

48. A method of preventing, treating or ameliorating a medically attended C. difficile infection in a human subject, the method comprising administering to the human subject an immunogenic composition of claim 1.

49. The method of claim 46, wherein the immunogenic composition is administered in a first and second dose.

50. The method of claim 49, wherein the second dose is administered about 2 months after the first dose (e.g. M 0, 2) or about 6 months after the first dose (M 0, 6).

51. The method of claim 46, wherein the human subject is 18 years of age or older, 50 years of age or older, 55 years of age or older, 60 years of age or older, 65 years of age or older, or 70 years of age or older.

52. The method of claim 46, wherein
the immune response elicits neutralizing antibodies against C. difficile toxin A and/or neutralizing antibodies against C. difficile toxin B; and/or
the immune response elicits greater neutralizing antibodies against C. difficile toxin A and/or B after administration of 2 doses of the immunogenic composition compared to administration of 3 doses of the investigational C. difficile vaccine.

53. (canceled)

The application's sequence listing, which the Patent Office published only in electronic form, follows.

SEQUENCE LISTING (861 sequences)

SEQ ID NO: 1 - protein, 2709 aa, Clostridium difficile
SLISKEELIKLAYSIRPRENEYKTILTNLDEYNKLTTNNNENKYLQLKKLNESIDVFMNKYKTSSRNRALSNLKKDILKEVILIKNSNTSPVEKNLHFVWIGGEVSDIALEYIKQWADINAEYNIKLWYDSEAFLVNTLKKAIVESSTTEALQLLEEEIQNPQFDNMKFYKKRMEFIYDRQKRFINYYKSQINKPTVPTIDDIIKSHLVSEYNRDETVLESYRTNSLRKINSNHGIDIRANSLFTEQELLNIYSQELLNRGNLAAASDIVRLLALKNFGGVYLDVDMLPGIHSDLFKTISRPSSIGLDRWEMIKLEAIMKYKKYINNYTSENFDKLDQQLKDNFKLIIESKSEKSEIFSKLENLNVSDLEIKIAFALGSVINQALISKQGSYLTNLVIEQVKNRYQFLNQHLNPAIESDNNFTDTTKIFHDSLFNSATAENSMFLTKIAPYLQVGFMPEARSTISLSGPGAYASAYYDFINLQENTIEKTLKASDLIEFKFPENNLSQLTEQEINSLWSFDQASAKYQFEKYVRDYTGGSLSEDNGVDFNKNTALDKNYLLNNKIPSNNVEEAGSKNYVHYIIQLQGDDISYEATCNLFSKNPKNSIIIQRNMNESAKSYFLSDDGESILELNKYRIPERLKNKEKVKVTFIGHGKDEFNTSEFARLSVDSLSNEISSFLDTIKLDISPKNVEVNLLGCNMFSYDFNVEETYPGKLLLSIMDKITSTLPDVNKNSITIGANQYEVRINSEGRKELLAHSGKWINKEEAIMSDLSSKEYIFFDSIDNKLKAKSKNIPGLASISEDIKTLLLDASVSPDTKFILNNLKLNIESSIGDYIYYEKLEPVKNIIHNSIDDLIDEFNLLENVSDELYELKKLNNLDEKYLISFEDISKNNSTYSVRFINKSNGESVYVETEKEIFSKYSEHITKEISTIKNSIITDVNGNLLDNIQLDHTSQVNTLNAAFFIQSLIDYSSNKDVLNDLSTSVKVQLYAQLFSTGLNTIYDSIQLVNLISNAVNDTINVLPTITEGIPIVSTILDGINLGAAIKELLDEHDPLLKKELEAKVGVLAINMSLSIAATVASIVGIGAEVTIFLLPIAGISAGIPSLVNNELILHDKATSVVNYFNHLSESKKYGPLKTEDDKILVPIDDLVISEIDFNNNSIKLGTCNILAMEGGSGHTVTGNIDHFFSSPSISSHIPSLSIYSAIGIETENLDFSKKIMMLPNAPSRVFWWETGAVPGLRSLENDGTRLLDSIRDLYPGKFYWRFYAFFDYAITTLKPVYEDTNIKIKLDKDTRNFIMPTITTNEIRNKLSYSFDGAGGTYSLLLSSYPISTNINLSKDDLWIFNIDNEVREISIENGTIKKGKLIKDVLSKIDINKNKLIIGNQTIDFSGDIDNKDRYIFLTCELDDKISLIIEINLVAKSYSLLLSGDKNYLISNLSNIIEKINTLGLDSKNIAYNYTDESNNKYFGAISKTSQKSIIHYKKDSKNILEFYNDSTLEFNSKDFIAEDINVFMKDDINTITGKYYVDNNTDKSIDFSISLVSKNQVKVNGLYLNESVYSSYLDFVKNSDGHHNTSNFMNLFLDNISFWKLFGFENINFVIDKYFTLVGKTNLGYVEFICDNNKNIDIYFGEWKTSSSKSTIFSGNGRNVVVEPIYNPDTGEDISTSLDFSYEPLYGIDRYINKVLIAPDLYTSLININTNYYSNEYYPEIIVLNPNTFHKKVNINLDSSSFEYKWSTEGSDFILVRYLEESNKKILQKIRIKGILSNTQSFNKMSIDFKDIKKLSLGYIMSNFKSFNSENELDRDHLGFKIIDNKTYYYDEDSKLVKGLININNSLFYFDPIEFNLVTGWQTINGKKYYFDINTGAALISYKIINGKHFYFNNDGVMQLGVFKGPDGFEYFAPANTQNNNIEGQAIVYQSKFLTLNGKKYYFDNDSKAVTGWRIINNEKYYFNPNNAIAAVGLQVIDNNKYYFNPDTAIISKGWQTVNGSRYYFDTDTAIAFNGYKTIDGKHFYFDSDCVVKIGVFSTSNGFEYFAPANTYNNNIEGQAIVYQSKFLTLNGKKYYFDNNSKAVTGWQTIDSKKYYFNTNTAEAATGWQTIDGKKYYFNTNTAEAATGWQTIDGKKYYFNTNTAIASTGYTIINGKHFYFNTDGIMQIGVFKGPNGFEYFAPANTDANNIEGQAILYQNEFLTLNGKKYYFGSDSKAVTGWRIINNKKYYFNPNNAIAAIHLCTINNDKYYFSYDGILQNGYITIERNNFYFDANNESKMVTGVFKGPNGFEYFAPANTHNNNIEGQAIVYQNKFLTLNGKKYYFDNDSKAVTGWQTIDGKKYYFNLNTAEAATGWQTIDGKKYYFNLNTAEAATGWQTIDGKKYYFNTNTFIASTGYTSINGKHFYFNTDGIMQIGVFKGPNGFEYFAPANTHNNNIEGQAILYQNKFLTLNGKKYYFGSDSKAVTGLRTIDGKKYYFNTNTAVAVTGWQTINGKKYYFNTNTSIASTGYTIISGKHFYFNTDGIMQIGVFKGPDGFEYFAPANTDANNIEGQAIRYQNRFLYLHDNIYYFGNNSKAATGWVTIDGNRYYFEPNTAMGANGYKTIDNKNFYFRNGLPQIGVFKGSNGFEYFAPANTDANNIEGQAIRYQNRFLHLLGKIYYFGNNSKAVTGWQTINGKVYYFMPDTAMAAAGGLFEIDGVIYFFGVDGVKAPGIYG

SEQ ID NO: 2 - protein, 2366 aa, Clostridium difficile
MSLVNRKQLEKMANVRFRTQEDEYVAILDALEEYHNMSENTVVEKYLKLKDINSLTDIYIDTYKKSGRNKALKKFKEYLVTEVLELKNNNLTPVEKNLHFVWIGGQINDTAINYINQWKDVNSDYNVNVFYDSNAFLINTLKKTVVESAINDTLESFRENLNDPRFDYNKFFRKRMEIIYDKQKNFINYYKAQREENPELIIDDIVKTYLSNEYSKEIDELNTYIEESLNKITQNSGNDVRNFEEFKNGESFNLYEQELVERWNLAAASDILRISALKEIGGMYLDVDMLPGIQPDLFESIEKPSSVTVDFWEMTKLEAIMKYKEYIPEYTSEHFDMLDEEVQSSFESVLASKSDKSEIFSSLGDMEASPLEVKIAFNSKGIINQGLISVKDSYCSNLIVKQIENRYKILNNSLNPAISEDNDFNTTTNTFIDSIMAEANADNGRFMMELGKYLRVGFFPDVKTTINLSGPEAYAAAYQDLLMFKEGSMNIHLIEADLRNFEISKTNISQSTEQEMASLWSFDDARAKAQFEEYKRNYFEGSLGEDDNLDFSQNIVVDKEYLLEKISSLARSSERGYIHYIVQLQGDKISYEAACNLFAKTPYDSVLFQKNIEDSEIAYYYNPGDGEIQEIDKYKIPSIISDRPKIKLTFIGHGKDEFNTDIFAGFDVDSLSTEIEAAIDLAKEDISPKSIEINLLGCNMFSYSINVEETYPGKLLLKVKDKISELMPSISQDSIIVSANQYEVRINSEGRRELLDHSGEWINKEESIIKDISSKEYISFNPKENKITVKSKNLPELSTLLQEIRNNSNSSDIELEEKVMLTECEINVISNIDTQIVEERIEEAKNLTSDSINYIKDEFKLIESISDALCDLKQQNELEDSHFISFEDISETDEGFSIRFINKETGESIFVETEKTIFSEYANHITEEISKIKGTIFDTVNGKLVKKVNLDTTHEVNTLNAAFFIQSLIEYNSSKESLSNLSVAMKVQVYAQLFSTGLNTITDAAKVVELVSTALDETIDLLPTLSEGLPIIATIIDGVSLGAAIKELSETSDPLLRQEIEAKIGIMAVNLTTATTAIITSSLGIASGFSILLVPLAGISAGIPSLVNNELVLRDKATKVVDYFKHVSLVETEGVFTLLDDKIMMPQDDLVISEIDFNNNSIVLGKCEIWRMEGGSGHTVTDDIDHFFSAPSITYREPHLSIYDVLEVQKEELDLSKDLMVLPNAPNRVFAWETGWTPGLRSLENDGTKLLDRIRDNYEGEFYWRYFAFIADALITTLKPRYEDTNIRINLDSNTRSFIVPIITTEYIREKLSYSFYGSGGTYALSLSQYNMGINIELSESDVWIIDVDNVVRDVTIESDKIKKGDLIEGILSTLSIEENKIILNSHEINFSGEVNGSNGFVSLTFSILEGINAIIEVDLLSKSYKLLISGELKILMLNSNHIQQKIDYIGFNSELQKNIPYSFVDSEGKENGFINGSTKEGLFVSELPDVVLISKVYMDDSKPSFGYYSNNLKDVKVITKDNVNILTGYYLKDDIKISLSLTLQDEKTIKLNSVHLDESGVAEILKFMNRKGNTNTSDSLMSFLESMNIKSIFVNFLQSNIKFILDANFIISGTTSIGQFEFICDENDNIQPYFIKFNTLETNYTLYVGNRQNMIVEPNYDLDDSGDISSTVINFSQKYLYGIDSCVNKVVISPNIYTDEINITPVYETNNTYPEVIVLDANYINEKINVNINDLSIRYVWSNDGNDFILMSTSEENKVSQVKIRFVNVFKDKTLANKLSFNFSDKQDVPVSEIILSFTPSYYEDGLIGYDLGLVSLYNEKFYINNFGMMVSGLIYINDSLYYFKPPVNNLITGFVTVGDDKYYFNPINGGAASIGETIIDDKNYYFNQSGVLQTGVFSTEDGFKYFAPANTLDENLEGEAIDFTGKLIIDENIYYFDDNYRGAVEWKELDGEMHYFSPETGKAFKGLNQIGDYKYYFNSDGVMQKGFVSINDNKHYFDDSGVMKVGYTEIDGKHFYFAENGEMQIGVFNTEDGFKYFAHHNEDLGNEEGEEISYSGILNFNNKIYYFDDSFTAVVGWKDLEDGSKYYFDEDTAEAYIGLSLINDGQYYFNDDGIMQVGFVTINDKVFYFSDSGIIESGVQNIDDNYFYIDDNGIVQIGVFDTSDGYKYFAPANTVNDNIYGQAVEYSGLVRVGEDVYYFGETYTIETGWIYDMENESDKYYFNPETKKACKGINLIDDIKYYFDEKGIMRTGLISFENNNYYFNENGEMQFGYINIEDKMFYFGEDGVMQIGVFNTPDGFKYFAHQNTLDENFEGESINYTGWLDLDEKRYYFTDEYIAATGSVIIDGEEYYFDPDTAQLVISE

SEQ ID NO: 3 - protein, 2710 aa, synthetic construct
  REGION 1..2710: note = Synthetic amino acid sequence: TcdA (D285A D287A mutations)
MSLISKEELIKLAYSIRPRENEYKTILTNLDEYNKLTTNNNENKYLQLKKLNESIDVFMNKYKTSSRNRALSNLKKDILKEVILIKNSNTSPVEKNLHFVWIGGEVSDIALEYIKQWADINAEYNIKLWYDSEAFLVNTLKKAIVESSTTEALQLLEEEIQNPQFDNMKFYKKRMEFIYDRQKRFINYYKSQINKPTVPTIDDIIKSHLVSEYNRDETVLESYRTNSLRKINSNHGIDIRANSLFTEQELLNIYSQELLNRGNLAAASDIVRLLALKNFGGVYLAVAMLPGIHSDLFKTISRPSSIGLDRWEMIKLEAIMKYKKYINNYTSENFDKLDQQLKDNFKLIIESKSEKSEIFSKLENLNVSDLEIKIAFALGSVINQALISKQGSYLTNLVIEQVKNRYQFLNQHLNPAIESDNNFTDTTKIFHDSLFNSATAENSMFLTKIAPYLQVGFMPEARSTISLSGPGAYASAYYDFINLQENTIEKTLKASDLIEFKFPENNLSQLTEQEINSLWSFDQASAKYQFEKYVRDYTGGSLSEDNGVDFNKNTALDKNYLLNNKIPSNNVEEAGSKNYVHYIIQLQGDDISYEATCNLFSKNPKNSIIIQRNMNESAKSYFLSDDGESILELNKYRIPERLKNKEKVKVTFIGHGKDEFNTSEFARLSVDSLSNEISSFLDTIKLDISPKNVEVNLLGCNMFSYDFNVEETYPGKLLLSIMDKITSTLPDVNKNSITIGANQYEVRINSEGRKELLAHSGKWINKEEAIMSDLSSKEYIFFDSIDNKLKAKSKNIPGLASISEDIKTLLLDASVSPDTKFILNNLKLNIESSIGDYIYYEKLEPVKNIIHNSIDDLIDEFNLLENVSDELYELKKLNNLDEKYLISFEDISKNNSTYSVRFINKSNGESVYVETEKEIFSKYSEHITKEISTIKNSIITDVNGNLLDNIQLDHTSQVNTLNAAFFIQSLIDYSSNKDVLNDLSTSVKVQLYAQLFSTGLNTIYDSIQLVNLISNAVNDTINVLPTITEGIPIVSTILDGINLGAAIKELLDEHDPLLKKELEAKVGVLAINMSLSIAATVASIVGIGAEVTIFLLPIAGISAGIPSLVNNELILHDKATSVVNYFNHLSESKKYGPLKTEDDKILVPIDDLVISEIDFNNNSIKLGTCNILAMEGGSGHTVTGNIDHFFSSPSISSHIPSLSIYSAIGIETENLDFSKKIMMLPNAPSRVFWWETGAVPGLRSLENDGTRLLDSIRDLYPGKFYWRFYAFFDYAITTLKPVYEDTNIKIKLDKDTRNFIMPTITTNEIRNKLSYSFDGAGGTYSLLLSSYPISTNINLSKDDLWIFNIDNEVREISIENGTIKKGKLIKDVLSKIDINKNKLIIGNQTIDFSGDIDNKDRYIFLTCELDDKISLIIEINLVAKSYSLLLSGDKNYLISNLSNIIEKINTLGLDSKNIAYNYTDESNNKYFGAISKTSQKSIIHYKKDSKNILEFYNDSTLEFNSKDFIAEDINVFMKDDINTITGKYYVDNNTDKSIDFSISLVSKNQVKVNGLYLNESVYSSYLDFVKNSDGHHNTSNFMNLFLDNISFWKLFGFENINFVIDKYFTLVGKTNLGYVEFICDNNKNIDIYFGEWKTSSSKSTIFSGNGRNVVVEPIYNPDTGEDISTSLDFSYEPLYGIDRYINKVLIAPDLYTSLININTNYYSNEYYPEIIVLNPNTFHKKVNINLDSSSFEYKWSTEGSDFILVRYLEESNKKILQKIRIKGILSNTQSFNKMSIDFKDIKKLSLGYIMSNFKSFNSENELDRDHLGFKIIDNKTYYYDEDSKLVKGLININNSLFYFDPIEFNLVTGWQTINGKKYYFDINTGAALISYKIINGKHFYFNNDGVMQLGVFKGPDGFEYFAPANTQNNNIEGQAIVYQSKFLTLNGKKYYFDNDSKAVTGWRIINNEKYYFNPNNAIAAVGLQVIDNNKYYFNPDTAIISKGWQTVNGSRYYFDTDTAIAFNGYKTIDGKHFYFDSDCVVKIGVFSTSNGFEYFAPANTYNNNIEGQAIVYQSKFLTLNGKKYYFDNNSKAVTGWQTIDSKKYYFNTNTAEAATGWQTIDGKKYYFNTNTAEAATGWQTIDGKKYYFNTNTAIASTGYTIINGKHFYFNTDGIMQIGVFKGPNGFEYFAPANTDANNIEGQAILYQNEFLTLNGKKYYFGSDSKAVTGWRIINNKKYYFNPNNAIAAIHLCTINNDKYYFSYDGILQNGYITIERNNFYFDANNESKMVTGVFKGPNGFEYFAPANTHNNNIEGQAIVYQNKFLTLNGKKYYFDNDSKAVTGWQTIDGKKYYFNLNTAEAATGWQTIDGKKYYFNLNTAEAATGWQTIDGKKYYFNTNTFIASTGYTSINGKHFYFNTDGIMQIGVFKGPNGFEYFAPANTHNNNIEGQAILYQNKFLTLNGKKYYFGSDSKAVTGLRTIDGKKYYFNTNTAVAVTGWQTINGKKYYFNTNTSIASTGYTIISGKHFYFNTDGIMQIGVFKGPDGFEYFAPANTDANNIEGQAIRYQNRFLYLHDNIYYFGNNSKAATGWVTIDGNRYYFEPNTAMGANGYKTIDNKNFYFRNGLPQIGVFKGSNGFEYFAPANTDANNIEGQAIRYQNRFLHLLGKIYYFGNNSKAVTGWQTINGKVYYFMPDTAMAAAGGLFEIDGVIYFFGVDGVKAPGIYG

SEQ ID NO: 4 - protein, 2710 aa, synthetic construct
  REGION 1..2710: note = Synthetic amino acid sequence: TcdA (D285A D287A C700A mutations)
MSLISKEELIKLAYSIRPRENEYKTILTNLDEYNKLTTNNNENKYLQLKKLNESIDVFMNKYKTSSRNRALSNLKKDILKEVILIKNSNTSPVEKNLHFVWIGGEVSDIALEYIKQWADINAEYNIKLWYDSEAFLVNTLKKAIVESSTTEALQLLEEEIQNPQFDNMKFYKKRMEFIYDRQKRFINYYKSQINKPTVPTIDDIIKSHLVSEYNRDETVLESYRTNSLRKINSNHGIDIRANSLFTEQELLNIYSQELLNRGNLAAASDIVRLLALKNFGGVYLAVAMLPGIHSDLFKTISRPSSIGLDRWEMIKLEAIMKYKKYINNYTSENFDKLDQQLKDNFKLIIESKSEKSEIFSKLENLNVSDLEIKIAFALGSVINQALISKQGSYLTNLVIEQVKNRYQFLNQHLNPAIESDNNFTDTTKIFHDSLFNSATAENSMFLTKIAPYLQVGFMPEARSTISLSGPGAYASAYYDFINLQENTIEKTLKASDLIEFKFPENNLSQLTEQEINSLWSFDQASAKYQFEKYVRDYTGGSLSEDNGVDFNKNTALDKNYLLNNKIPSNNVEEAGSKNYVHYIIQLQGDDISYEATCNLFSKNPKNSIIIQRNMNESAKSYFLSDDGESILELNKYRIPERLKNKEKVKVTFIGHGKDEFNTSEFARLSVDSLSNEISSFLDTIKLDISPKNVEVNLLGANMFSYDFNVEETYPGKLLLSIMDKITSTLPDVNKNSITIGANQYEVRINSEGRKELLAHSGKWINKEEAIMSDLSSKEYIFFDSIDNKLKAKSKNIPGLASISEDIKTLLLDASVSPDTKFILNNLKLNIESSIGDYIYYEKLEPVKNIIHNSIDDLIDEFNLLENVSDELYELKKLNNLDEKYLISFEDISKNNSTYSVRFINKSNGESVYVETEKEIFSKYSEHITKEISTIKNSIITDVNGNLLDNIQLDHTSQVNTLNAAFFIQSLIDYSSNKDVLNDLSTSVKVQLYAQLFSTGLNTIYDSIQLVNLISNAVNDTINVLPTITEGIPIVSTILDGINLGAAIKELLDEHDPLLKKELEAKVGVLAINMSLSIAATVASIVGIGAEVTIFLLPIAGISAGIPSLVNNELILHDKATSVVNYFNHLSESKKYGPLKTEDDKILVPIDDLVISEIDFNNNSIKLGTCNILAMEGGSGHTVTGNIDHFFSSPSISSHIPSLSIYSAIGIETENLDFSKKIMMLPNAPSRVFWWETGAVPGLRSLENDGTRLLDSIRDLYPGKFYWRFYAFFDYAITTLKPVYEDTNIKIKLDKDTRNFIMPTITTNEIRNKLSYSFDGAGGTYSLLLSSYPISTNINLSKDDLWIFNIDNEVREISIENGTIKKGKLIKDVLSKIDINKNKLIIGNQTIDFSGDIDNKDRYIFLTCELDDKISLIIEINLVAKSYSLLLSGDKNYLISNLSNIIEKINTLGLDSKNIAYNYTDESNNKYFGAISKTSQKSIIHYKKDSKNILEFYNDSTLEFNSKDFIAEDINVFMKDDINTITGKYYVDNNTDKSIDFSISLVSKNQVKVNGLYLNESVYSSYLDFVKNSDGHHNTSNFMNLFLDNISFWKLFGFENINFVIDKYFTLVGKTNLGYVEFICDNNKNIDIYFGEWKTSSSKSTIFSGNGRNVVVEPIYNPDTGEDISTSLDFSYEPLYGIDRYINKVLIAPDLYTSLININTNYYSNEYYPEIIVLNPNTFHKKVNINLDSSSFEYKWSTEGSDFILVRYLEESNKKILQKIRIKGILSNTQSFNKMSIDFKDIKKLSLGYIMSNFKSFNSENELDRDHLGFKIIDNKTYYYDEDSKLVKGLININNSLFYFDPIEFNLVTGWQTINGKKYYFDINTGAALISYKIINGKHFYFNNDGVMQLGVFKGPDGFEYFAPANTQNNNIEGQAIVYQSKFLTLNGKKYYFDNDSKAVTGWRIINNEKYYFNPNNAIAAVGLQVIDNNKYYFNPDTAIISKGWQTVNGSRYYFDTDTAIAFNGYKTIDGKHFYFDSDCVVKIGVFSTSNGFEYFAPANTYNNNIEGQAIVYQSKFLTLNGKKYYFDNNSKAVTGWQTIDSKKYYFNTNTAEAATGWQTIDGKKYYFNTNTAEAATGWQTIDGKKYYFNTNTAIASTGYTIINGKHFYFNTDGIMQIGVFKGPNGFEYFAPANTDANNIEGQAILYQNEFLTLNGKKYYFGSDSKAVTGWRIINNKKYYFNPNNAIAAIHLCTINNDKYYFSYDGILQNGYITIERNNFYFDANNESKMVTGVFKGPNGFEYFAPANTHNNNIEGQAIVYQNKFLTLNGKKYYFDNDSKAVTGWQTIDGKKYYFNLNTAEAATGWQTIDGKKYYFNLNTAEAATGWQTIDGKKYYFNTNTFIASTGYTSINGKHFYFNTDGIMQIGVFKGPNGFEYFAPANTHNNNIEGQAILYQNKFLTLNGKKYYFGSDSKAVTGLRTIDGKKYYFNTNTAVAVTGWQTINGKKYYFNTNTSIASTGYTIISGKHFYFNTDGIMQIGVFKGPDGFEYFAPANTDANNIEGQAIRYQNRFLYLHDNIYYFGNNSKAATGWVTIDGNRYYFEPNTAMGANGYKTIDNKNFYFRNGLPQIGVFKGSNGFEYFAPANTDANNIEGQAIRYQNRFLHLLGKIYYFGNNSKAVTGWQTINGKVYYFMPDTAMAAAGGLFEIDGVIYFFGVDGVKAPGIYG

SEQ ID NO: 5 - protein, 2366 aa, synthetic construct
  REGION 1..2366: note = Synthetic amino acid sequence: TcdB (D286A D288A mutations)
MSLVNRKQLEKMANVRFRTQEDEYVAILDALEEYHNMSENTVVEKYLKLKDINSLTDIYIDTYKKSGRNKALKKFKEYLVTEVLELKNNNLTPVEKNLHFVWIGGQINDTAINYINQWKDVNSDYNVNVFYDSNAFLINTLKKTVVESAINDTLESFRENLNDPRFDYNKFFRKRMEIIYDKQKNFINYYKAQREENPELIIDDIVKTYLSNEYSKEIDELNTYIEESLNKITQNSGNDVRNFEEFKNGESFNLYEQELVERWNLAAASDILRISALKEIGGMYLAVAMLPGIQPDLFESIEKPSSVTVDFWEMTKLEAIMKYKEYIPEYTSEHFDMLDEEVQSSFESVLASKSDKSEIFSSLGDMEASPLEVKIAFNSKGIINQGLISVKDSYCSNLIVKQIENRYKILNNSLNPAISEDNDFNTTTNTFIDSIMAEANADNGRFMMELGKYLRVGFFPDVKTTINLSGPEAYAAAYQDLLMFKEGSMNIHLIEADLRNFEISKTNISQSTEQEMASLWSFDDARAKAQFEEYKRNYFEGSLGEDDNLDFSQNIVVDKEYLLEKISSLARSSERGYIHYIVQLQGDKISYEAACNLFAKTPYDSVLFQKNIEDSEIAYYYNPGDGEIQEIDKYKIPSIISDRPKIKLTFIGHGKDEFNTDIFAGFDVDSLSTEIEAAIDLAKEDISPKSIEINLLGCNMFSYSINVEETYPGKLLLKVKDKISELMPSISQDSIIVSANQYEVRINSEGRRELLDHSGEWINKEESIIKDISSKEYISFNPKENKITVKSKNLPELSTLLQEIRNNSNSSDIELEEKVMLTECEINVISNIDTQIVEERIEEAKNLTSDSINYIKDEFKLIESISDALCDLKQQNELEDSHFISFEDISETDEGFSIRFINKETGESIFVETEKTIFSEYANHITEEISKIKGTIFDTVNGKLVKKVNLDTTHEVNTLNAAFFIQSLIEYNSSKESLSNLSVAMKVQVYAQLFSTGLNTITDAAKVVELVSTALDETIDLLPTLSEGLPIIATIIDGVSLGAAIKELSETSDPLLRQEIEAKIGIMAVNLTTATTAIITSSLGIASGFSILLVPLAGISAGIPSLVNNELVLRDKATKVVDYFKHVSLVETEGVFTLLDDKIMMPQDDLVISEIDFNNNSIVLGKCEIWRMEGGSGHTVTDDIDHFFSAPSITYREPHLSIYDVLEVQKEELDLSKDLMVLPNAPNRVFAWETGWTPGLRSLENDGTKLLDRIRDNYEGEFYWRYFAFIADALITTLKPRYEDTNIRINLDSNTRSFIVPIITTEYIREKLSYSFYGSGGTYALSLSQYNMGINIELSESDVWIIDVDNVVRDVTIESDKIKKGDLIEGILSTLSIEENKIILNSHEINFSGEVNGSNGFVSLTFSILEGINAIIEVDLLSKSYKLLISGELKILMLNSNHIQQKIDYIGFNSELQKNIPYSFVDSEGKENGFINGSTKEGLFVSELPDVVLISKVYMDDSKPSFGYYSNNLKDVKVITKDNVNILTGYYLKDDIKISLSLTLQDEKTIKLNSVHLDESGVAEILKFMNRKGNTNTSDSLMSFLESMNIKSIFVNFLQSNIKFILDANFIISGTTSIGQFEFICDENDNIQPYFIKFNTLETNYTLYVGNRQNMIVEPNYDLDDSGDISSTVINFSQKYLYGIDSCVNKVVISPNIYTDEINITPVYETNNTYPEVIVLDANYINEKINVNINDLSIRYVWSNDGNDFILMSTSEENKVSQVKIRFVNVFKDKTLANKLSFNFSDKQDVPVSEIILSFTPSYYEDGLIGYDLGLVSLYNEKFYINNFGMMVSGLIYINDSLYYFKPPVNNLITGFVTVGDDKYYFNPINGGAASIGETIIDDKNYYFNQSGVLQTGVFSTEDGFKYFAPANTLDENLEGEAIDFTGKLIIDENIYYFDDNYRGAVEWKELDGEMHYFSPETGKAFKGLNQIGDYKYYFNSDGVMQKGFVSINDNKHYFDDSGVMKVGYTEIDGKHFYFAENGEMQIGVFNTEDGFKYFAHHNEDLGNEEGEEISYSGILNFNNKIYYFDDSFTAVVGWKDLEDGSKYYFDEDTAEAYIGLSLINDGQYYFNDDGIMQVGFVTINDKVFYFSDSGIIESGVQNIDDNYFYIDDNGIVQIGVFDTSDGYKYFAPANTVNDNIYGQAVEYSGLVRVGEDVYYFGETYTIETGWIYDMENESDKYYFNPETKKACKGINLIDDIKYYFDEKGIMRTGLISFENNNYYFNENGEMQFGYINIEDKMFYFGEDGVMQIGVFNTPDGFKYFAHQNTLDENFEGESINYTGWLDLDEKRYYFTDEYIAATGSVIIDGEEYYFDPDTAQLVISE

SEQ ID NO: 6 - protein, 2366 aa, synthetic construct
  REGION 1..2366: note = Synthetic amino acid sequence: TcdB (D286A D288A C698A mutations)
MSLVNRKQLEKMANVRFRTQEDEYVAILDALEEYHNMSENTVVEKYLKLKDINSLTDIYIDTYKKSGRNKALKKFKEYLVTEVLELKNNNLTPVEKNLHFVWIGGQINDTAINYINQWKDVNSDYNVNVFYDSNAFLINTLKKTVVESAINDTLESFRENLNDPRFDYNKFFRKRMEIIYDKQKNFINYYKAQREENPELIIDDIVKTYLSNEYSKEIDELNTYIEESLNKITQNSGNDVRNFEEFKNGESFNLYEQELVERWNLAAASDILRISALKEIGGMYLAVAMLPGIQPDLFESIEKPSSVTVDFWEMTKLEAIMKYKEYIPEYTSEHFDMLDEEVQSSFESVLASKSDKSEIFSSLGDMEASPLEVKIAFNSKGIINQGLISVKDSYCSNLIVKQIENRYKILNNSLNPAISEDNDFNTTTNTFIDSIMAEANADNGRFMMELGKYLRVGFFPDVKTTINLSGPEAYAAAYQDLLMFKEGSMNIHLIEADLRNFEISKTNISQSTEQEMASLWSFDDARAKAQFEEYKRNYFEGSLGEDDNLDFSQNIVVDKEYLLEKISSLARSSERGYIHYIVQLQGDKISYEAACNLFAKTPYDSVLFQKNIEDSEIAYYYNPGDGEIQEIDKYKIPSIISDRPKIKLTFIGHGKDEFNTDIFAGFDVDSLSTEIEAAIDLAKEDISPKSIEINLLGANMFSYSINVEETYPGKLLLKVKDKISELMPSISQDSIIVSANQYEVRINSEGRRELLDHSGEWINKEESIIKDISSKEYISFNPKENKITVKSKNLPELSTLLQEIRNNSNSSDIELEEKVMLTECEINVISNIDTQIVEERIEEAKNLTSDSINYIKDEFKLIESISDALCDLKQQNELEDSHFISFEDISETDEGFSIRFINKETGESIFVETEKTIFSEYANHITEEISKIKGTIFDTVNGKLVKKVNLDTTHEVNTLNAAFFIQSLIEYNSSKESLSNLSVAMKVQVYAQLFSTGLNTITDAAKVVELVSTALDETIDLLPTLSEGLPIIATIIDGVSLGAAIKELSETSDPLLRQEIEAKIGIMAVNLTTATTAIITSSLGIASGFSILLVPLAGISAGIPSLVNNELVLRDKATKVVDYFKHVSLVETEGVFTLLDDKIMMPQDDLVISEIDFNNNSIVLGKCEIWRMEGGSGHTVTDDIDHFFSAPSITYREPHLSIYDVLEVQKEELDLSKDLMVLPNAPNRVFAWETGWTPGLRSLENDGTKLLDRIRDNYEGEFYWRYFAFIADALITTLKPRYEDTNIRINLDSNTRSFIVPIITTEYIREKLSYSFYGSGGTYALSLSQYNMGINIELSESDVWIIDVDNVVRDVTIESDKIKKGDLIEGILSTLSIEENKIILNSHEINFSGEVNGSNGFVSLTFSILEGINAIIEVDLLSKSYKLLISGELKILMLNSNHIQQKIDYIGFNSELQKNIPYSFVDSEGKENGFINGSTKEGLFVSELPDVVLISKVYMDDSKPSFGYYSNNLKDVKVITKDNVNILTGYYLKDDIKISLSLTLQDEKTIKLNSVHLDESGVAEILKFMNRKGNTNTSDSLMSFLESMNIKSIFVNFLQSNIKFILDANFIISGTTSIGQFEFICDENDNIQPYFIKFNTLETNYTLYVGNRQNMIVEPNYDLDDSGDISSTVINFSQKYLYGIDSCVNKVVISPNIYTDEINITPVYETNNTYPEVIVLDANYINEKINVNINDLSIRYVWSNDGNDFILMSTSEENKVSQVKIRFVNVFKDKTLANKLSFNFSDKQDVPVSEIILSFTPSYYEDGLIGYDLGLVSLYNEKFYINNFGMMVSGLIYINDSLYYFKPPVNNLITGFVTVGDDKYYFNPINGGAASIGETIIDDKNYYFNQSGVLQTGVFSTEDGFKYFAPANTLDENLEGEAIDFTGKLIIDENIYYFDDNYRGAVEWKELDGEMHYFSPETGKAFKGLNQIGDYKYYFNSDGVMQKGFVSINDNKHYFDDSGVMKVGYTEIDGKHFYFAENGEMQIGVFNTEDGFKYFAHHNEDLGNEEGEEISYSGILNFNNKIYYFDDSFTAVVGWKDLEDGSKYYFDEDTAEAYIGLSLINDGQYYFNDDGIMQVGFVTINDKVFYFSDSGIIESGVQNIDDNYFYIDDNGIVQIGVFDTSDGYKYFAPANTVNDNIYGQAVEYSGLVRVGEDVYYFGETYTIETGWIYDMENESDKYYFNPETKKACKGINLIDDIKYYFDEKGIMRTGLISFENNNYYFNENGEMQFGYINIEDKMFYFGEDGVMQIGVFNTPDGFKYFAHQNTLDENFEGESINYTGWLDLDEKRYYFTDEYIAATGSVIIDGEEYYFDPDTAQLVISE

SEQ ID NO: 7 - protein, 2710 aa, synthetic construct
  REGION 1..2710: note = Synthetic amino acid sequence: TcdA (D269A, R272A, D285A, D287A, E460A, R462A, and C700A mutations)
MSLISKEELIKLAYSIRPRENEYKTILTNLDEYNKLTTNNNENKYLQLKKLNESIDVFMNKYKTSSRNRALSNLKKDILKEVILIKNSNTSPVEKNLHFVWIGGEVSDIALEYIKQWADINAEYNIKLWYDSEAFLVNTLKKAIVESSTTEALQLLEEEIQNPQFDNMKFYKKRMEFIYDRQKRFINYYKSQINKPTVPTIDDIIKSHLVSEYNRDETVLESYRTNSLRKINSNHGIDIRANSLFTEQELLNIYSQELLNRGNLAAASAIVALLALKNFGGVYLAVAMLPGIHSDLFKTISRPSSIGLDRWEMIKLEAIMKYKKYINNYTSENFDKLDQQLKDNFKLIIESKSEKSEIFSKLENLNVSDLEIKIAFALGSVINQALISKQGSYLTNLVIEQVKNRYQFLNQHLNPAIESDNNFTDTTKIFHDSLFNSATAENSMFLTKIAPYLQVGFMPAAASTISLSGPGAYASAYYDFINLQENTIEKTLKASDLIEFKFPENNLSQLTEQEINSLWSFDQASAKYQFEKYVRDYTGGSLSEDNGVDFNKNTALDKNYLLNNKIPSNNVEEAGSKNYVHYIIQLQGDDISYEATCNLFSKNPKNSIIIQRNMNESAKSYFLSDDGESILELNKYRIPERLKNKEKVKVTFIGHGKDEFNTSEFARLSVDSLSNEISSFLDTIKLDISPKNVEVNLLGANMFSYDFNVEETYPGKLLLSIMDKITSTLPDVNKNSITIGANQYEVRINSEGRKELLAHSGKWINKEEAIMSDLSSKEYIFFDSIDNKLKAKSKNIPGLASISEDIKTLLLDASVSPDTKFILNNLKLNIESSIGDYIYYEKLEPVKNIIHNSIDDLIDEFNLLENVSDELYELKKLNNLDEKYLISFEDISKNNSTYSVRFINKSNGESVYVETEKEIFSKYSEHITKEISTIKNSIITDVNGNLLDNIQLDHTSQVNTLNAAFFIQSLIDYSSNKDVLNDLSTSVKVQLYAQLFSTGLNTIYDSIQLVNLISNAVNDTINVLPTITEGIPIVSTILDGINLGAAIKELLDEHDPLLKKELEAKVGVLAINMSLSIAATVASIVGIGAEVTIFLLPIAGISAGIPSLVNNELILHDKATSVVNYFNHLSESKKYGPLKTEDDKILVPIDDLVISEIDFNNNSIKLGTCNILAMEGGSGHTVTGNIDHFFSSPSISSHIPSLSIYSAIGIETENLDFSKKIMMLPNAPSRVFWWETGAVPGLRSLENDGTRLLDSIRDLYPGKFYWRFYAFFDYAITTLKPVYEDTNIKIKLDKDTRNFIMPTITTNEIRNKLSYSFDGAGGTYSLLLSSYPISTNINLSKDDLWIFNIDNEVREISIENGTIKKGKLIKDVLSKIDINKNKLIIGNQTIDFSGDIDNKDRYIFLTCELDDKISLIIEINLVAKSYSLLLSGDKNYLISNLSNIIEKINTLGLDSKNIAYNYTDESNNKYFGAISKTSQKSIIHYKKDSKNILEFYNDSTLEFNSKDFIAEDINVFMKDDINTITGKYYVDNNTDKSIDFSISLVSKNQVKVNGLYLNESVYSSYLDFVKNSDGHHNTSNFMNLFLDNISFWKLFGFENINFVIDKYFTLVGKTNLGYVEFICDNNKNIDIYFGEWKTSSSKSTIFSGNGRNVVVEPIYNPDTGEDISTSLDFSYEPLYGIDRYINKVLIAPDLYTSLININTNYYSNEYYPEIIVLNPNTFHKKVNINLDSSSFEYKWSTEGSDFILVRYLEESNKKILQKIRIKGILSNTQSFNKMSIDFKDIKKLSLGYIMSNFKSFNSENELDRDHLGFKIIDNKTYYYDEDSKLVKGLININNSLFYFDPIEFNLVTGWQTINGKKYYFDINTGAALISYKIINGKHFYFNNDGVMQLGVFKGPDGFEYFAPANTQNNNIEGQAIVYQSKFLTLNGKKYYFDNDSKAVTGWRIINNEKYYFNPNNAIAAVGLQVIDNNKYYFNPDTAIISKGWQTVNGSRYYFDTDTAIAFNGYKTIDGKHFYFDSDCVVKIGVFSTSNGFEYFAPANTYNNNIEGQAIVYQSKFLTLNGKKYYFDNNSKAVTGWQTIDSKKYYFNTNTAEAATGWQTIDGKKYYFNTNTAEAATGWQTIDGKKYYFNTNTAIASTGYTIINGKHFYFNTDGIMQIGVFKGPNGFEYFAPANTDANNIEGQAILYQNEFLTLNGKKYYFGSDSKAVTGWRIINNKKYYFNPNNAIAAIHLCTINNDKYYFSYDGILQNGYITIERNNFYFDANNESKMVTGVFKGPNGFEYFAPANTHNNNIEGQAIVYQNKFLTLNGKKYYFDNDSKAVTGWQTIDGKKYYFNLNTAEAATGWQTIDGKKYYFNLNTAEAATGWQTIDGKKYYFNTNTFIASTGYTSINGKHFYFNTDGIMQIGVFKGPNGFEYFAPANTHNNNIEGQAILYQNKFLTLNGKKYYFGSDSKAVTGLRTIDGKKYYFNTNTAVAVTGWQTINGKKYYFNTNTSIASTGYTIISGKHFYFNTDGIMQIGVFKGPDGFEYFAPANTDANNIEGQAIRYQNRFLYLHDNIYYFGNNSKAATGWVTIDGNRYYFEPNTAMGANGYKTIDNKNFYFRNGLPQIGVFKGSNGFEYFAPANTDANNIEGQAIRYQNRFLHLLGKIYYFGNNSKAVTGWQTINGKVYYFMPDTAMAAAGGLFEIDGVIYFFGVDGVKAPGIYG

SEQ ID NO: 8 - protein, 2366 aa, synthetic construct
  REGION 1..2366: note = Synthetic amino acid sequence: TcdB (D270A, R273A, D286A, D288A, D461A, K463A, and C698A mutations)
MSLVNRKQLEKMANVRFRTQEDEYVAILDALEEYHNMSENTVVEKYLKLKDINSLTDIYIDTYKKSGRNKALKKFKEYLVTEVLELKNNNLTPVEKNLHFVWIGGQINDTAINYINQWKDVNSDYNVNVFYDSNAFLINTLKKTVVESAINDTLESFRENLNDPRFDYNKFFRKRMEIIYDKQKNFINYYKAQREENPELIIDDIVKTYLSNEYSKEIDELNTYIEESLNKITQNSGNDVRNFEEFKNGESFNLYEQELVERWNLAAASAILAISALKEIGGMYLAVAMLPGIQPDLFESIEKPSSVTVDFWEMTKLEAIMKYKEYIPEYTSEHFDMLDEEVQSSFESVLASKSDKSEIFSSLGDMEASPLEVKIAFNSKGIINQGLISVKDSYCSNLIVKQIENRYKILNNSLNPAISEDNDFNTTTNTFIDSIMAEANADNGRFMMELGKYLRVGFFPAVATTINLSGPEAYAAAYQDLLMFKEGSMNIHLIEADLRNFEISKTNISQSTEQEMASLWSFDDARAKAQFEEYKRNYFEGSLGEDDNLDFSQNIVVDKEYLLEKISSLARSSERGYIHYIVQLQGDKISYEAACNLFAKTPYDSVLFQKNIEDSEIAYYYNPGDGEIQEIDKYKIPSIISDRPKIKLTFIGHGKDEFNTDIFAGFDVDSLSTEIEAAIDLAKEDISPKSIEINLLGANMFSYSINVEETYPGKLLLKVKDKISELMPSISQDSIIVSANQYEVRINSEGRRELLDHSGEWINKEESIIKDISSKEYISFNPKENKITVKSKNLPELSTLLQEIRNNSNSSDIELEEKVMLTECEINVISNIDTQIVEERIEEAKNLTSDSINYIKDEFKLIESISDALCDLKQQNELEDSHFISFEDISETDEGFSIRFINKETGESIFVETEKTIFSEYANHITEEISKIKGTIFDTVNGKLVKKVNLDTTHEVNTLNAAFFIQSLIEYNSSKESLSNLSVAMKVQVYAQLFSTGLNTITDAAKVVELVSTALDETIDLLPTLSEGLPIIATIIDGVSLGAAIKELSETSDPLLRQEIEAKIGIMAVNLTTATTAIITSSLGIASGFSILLVPLAGISAGIPSLVNNELVLRDKATKVVDYFKHVSLVETEGVFTLLDDKIMMPQDDLVISEIDFNNNSIVLGKCEIWRMEGGSGHTVTDDIDHFFSAPSITYREPHLSIYDVLEVQKEELDLSKDLMVLPNAPNRVFAWETGWTPGLRSLENDGTKLLDRIRDNYEGEFYWRYFAFIADALITTLKPRYEDTNIRINLDSNTRSFIVPIITTEYIREKLSYSFYGSGGTYALSLSQYNMGINIELSESDVWIIDVDNVVRDVTIESDKIKKGDLIEGILSTLSIEENKIILNSHEINFSGEVNGSNGFVSLTFSILEGINAIIEVDLLSKSYKLLISGELKILMLNSNHIQQKIDYIGFNSELQKNIPYSFVDSEGKENGFINGSTKEGLFVSELPDVVLISKVYMDDSKPSFGYYSNNLKDVKVITKDNVNILTGYYLKDDIKISLSLTLQDEKTIKLNSVHLDESGVAEILKFMNRKGNTNTSDSLMSFLESMNIKSIFVNFLQSNIKFILDANFIISGTTSIGQFEFICDENDNIQPYFIKFNTLETNYTLYVGNRQNMIVEPNYDLDDSGDISSTVINFSQKYLYGIDSCVNKVVISPNIYTDEINITPVYETNNTYPEVIVLDANYINEKINVNINDLSIRYVWSNDGNDFILMSTSEENKVSQVKIRFVNVFKDKTLANKLSFNFSDKQDVPVSEIILSFTPSYYEDGLIGYDLGLVSLYNEKFYINNFGMMVSGLIYINDSLYYFKPPVNNLITGFVTVGDDKYYFNPINGGAASIGETIIDDKNYYFNQSGVLQTGVFSTEDGFKYFAPANTLDENLEGEAIDFTGKLIIDENIYYFDDNYRGAVEWKELDGEMHYFSPETGKAFKGLNQIGDYKYYFNSDGVMQKGFVSINDNKHYFDDSGVMKVGYTEIDGKHFYFAENGEMQIGVFNTEDGFKYFAHHNEDLGNEEGEEISYSGILNFNNKIYYFDDSFTAVVGWKDLEDGSKYYFDEDTAEAYIGLSLINDGQYYFNDDGIMQVGFVTINDKVFYFSDSGIIESGVQNIDDNYFYIDDNGIVQIGVFDTSDGYKYFAPANTVNDNIYGQAVEYSGLVRVGEDVYYFGETYTIETGWIYDMENESDKYYFNPETKKACKGINLIDDIKYYFDEKGIMRTGLISFENNNYYFNENGEMQFGYINIEDKMFYFGEDGVMQIGVFNTPDGFKYFAHQNTLDENFEGESINYTGWLDLDEKRYYFTDEYIAATGSVIIDGEEYYFDPDTAQLVISE

SEQ ID NO: 9 - DNA, 8133 bp, Clostridium difficile
  source 1..8133: mol_type = genomic DNA
atgtctttaatatctaaagaagagttaataaaactcgcatatagcattagaccaagagaaaatgagtataaaactatactaactaatttagacgaatataataagttaactacaaacaataatgaaaataaatatttacaattaaaaaaactaaatgaatcaattgatgtttttatgaataaatataaaacttcaagcagaaatagagcactctctaatctaaaaaaagatatattaaaagaagtaattcttattaaaaattccaatacaagccctgtagaaaaaaatttacattttgtatggataggtggagaagtcagtgatattgctcttgaatacataaaacaatgggctgatattaatgcagaatataatattaaactgtggtatgatagtgaagcattcttagtaaatacactaaaaaaggctatagttgaatcttctaccactgaagcattacagctactagaggaagagattcaaaatcctcaatttgataatatgaaattttacaaaaaaaggatggaatttatatatgatagacaaaaaaggtttataaattattataaatctcaaatcaataaacctacagtacctacaatagatgatattataaagtctcatctagtatctgaatataatagagatgaaactgtattagaatcatatagaacaaattctttgagaaaaataaatagtaatcatgggatagatatcagggctaatagtttgtttacagaacaagagttattaaatatttatagtcaggagttgttaaatcgtggaaatttagctgcagcatctgacatagtaagattattagccctaaaaaattttggcggagtatatttagatgttgatatgcttccaggtattcactctgatttatttaaaacaatatctagacctagctctattggactagaccgttgggaaatgataaaattagaggctattatgaagtataaaaaatatataaataattatacatcagaaaactttgataaacttgatcaacaattaaaagataattttaaactcattatagaaagtaaaagtgaaaaatctgagatattttctaaattagaaaatttaaatgtatctgatcttgaaattaaaatagctttcgctttaggcagtgttataaatcaagccttgatatcaaaacaaggttcatatcttactaacctagtaatagaacaagtaaaaaatagatatcaatttttaaaccaacaccttaacccagccatagagtctgataataacttcacagatactactaaaatttttcatgattcattatttaattcagctaccgcagaaaactctatgtttttaacaaaaatagcaccatacttacaagtaggttttatgccagaagctcgctccacaataagtttaagtggtccaggagcttatgcgtcagcttactatgatttcataaatttacaagaaaatactatagaaaaaactttaaaagcatcagatttaatagaatttaaattcccagaaaataatctatctcaattgacagaacaagaaataaatagtctatggagctttgatcaagcaagtgcaaaatatcaatttgagaaatatgtaagagattatactggtggatctctttctgaagacaatggggtagactttaataaaaatactgccctcgacaaaaactatttattaaataataaaattccatcaaacaatgtagaagaagctggaagtaaaaattatgttcattatatcatacagttacaaggagatgatataagttatgaagcaacatgcaatttattttctaaaaatcctaaaaatagtattattatacaacgaaatatgaatgaaagtgcaaaaagctactttttaagtgatgatggagaatctattttagaattaaataaatataggatacctgaaagattaaaaaataaggaaaaagtaaaagtaacctttattggacatggtaaagatgaattcaacacaagcgaatttgctagattaagtgtagattcactttccaatgagataagttcatttttagataccataaaattagatatatcacctaaaaatgtagaagtaaacttacttggatgtaatatgtttagttatgattttaatgttgaagaaacttatcctgggaagttgctattaagtattatggacaaaattacttccactttacctgatgtaaataaaaattctattactataggagcaaatcaatatgaagtaagaattaatagtgagggaagaaaagaacttctggctcactcaggtaaatggataaataaagaagaagctattatgagcgatttatctagtaaagaatacattttttttgattctatagataataagctaaaagcaaagtccaagaatattccaggattagcatcaatatcagaagatataaaaacattattacttgatgcaagtgttagtcctgatacaaaatttattttaaataatcttaagcttaatattgaatcttctattggtgattacatttattatgaaaaattagagcctgttaaaaatataattcacaattctatagatgatttaatagatgagttcaatctacttgaaaatgtatctgatgaattatatgaattaaaaaaattaaataatctagatgagaagtatttaatatcttttgaagatatctcaaaaaataattcaacttactctgtaagatttattaacaaaagtaatggtgagtcagtttatgtagaaacagaaaaagaaattttttcaaaatatagcgaacatattacaaaagaaataagtactataaagaatagtataattacagatgttaatggtaatttattggataatatacagttagatcatacttctcaagttaatacattaaacgcagcattctttattcaatcattaatagattatagtagcaataaagatgtactgaatgatttaagtacctcagttaaggttcaactttatgctcaactatttagtacaggtttaaatactatatatgactctatccaattagtaaatttaatatcaaatgcagtaaatgatactataaatgtactacctacaataacagaggggatacctattgtatctactatattagacggaataaacttaggtgcagcaattaaggaattactagacgaacatgacccattactaaaaaaagaattagaagctaaggtgggtgttttagcaataaatatgtcattatctatagctgcaactgtagcttcaattgttggaataggtgctgaagttactattttcttattacctatagctggtatatctgcaggaataccttcattagttaataatgaattaatattgcatgataaggcaacttcagtggtaaactattttaatcatttgtctgaatctaaaaaatatggccctcttaaaacagaagatgataaaattttagttcctattgatgatttagtaatatcagaaatagattttaataataattcgataaaactaggaacatgtaatatattagcaatggaggggggatcaggacacacagtgactggtaatatagatcactttttctcatctccatctataagttctcatattccttcattatcaatttattctgcaataggtatagaaacagaaaatctagatttttcaaaaaaaataatgatgttacctaatgctccttcaagagtgttttggtgggaaactggagcagttccaggtttaagatcattggaaaatgacggaactagattacttgattcaataagagatttatacccaggtaaattttactggagattctatgcttttttcgattatgcaataactacattaaaaccagtttatgaagacactaatattaaaattaaactagataaagatactagaaacttcataatgccaactataactactaacgaaattagaaacaaattatcttattcatttgatggagcaggaggaacttactctttattattatcttcatatccaatatcaacgaatataaatttatctaaagatgatttatggatatttaatattgataatgaagtaagagaaatatctatagaaaatggtactattaaaaaaggaaagttaataaaagatgttttaagtaaaattgatataaataaaaataaacttattataggcaatcaaacaatagatttttcaggcgatatagataataaagatagatatatattcttgacttgtgagttagatgataaaattagtttaataatagaaataaatcttgttgcaaaatcttatagtttgttattgtctggggataaaaattatttgatatccaatttatctaatattattgagaaaatcaatactttaggcctagatagtaaaaatatagcgtacaattacactgatgaatctaataataaatattttggagctatatctaaaacaagtcaaaaaagcataatacattataaaaaagacagtaaaaatatattagaattttataatgacagtacattagaatttaacagtaaagattttattgctgaagatataaatgtatttatgaaagatgatattaatactataacaggaaaatactatgttgataataatactgataaaagtatagatttctctatttctttagttagtaaaaatcaagtaaaagtaaatggattatatttaaatgaatccgtatactcatcttaccttgattttgtgaaaaattcagatggacaccataatacttctaattttatgaatttatttttggacaatataagtttctggaaattgtttgggtttgaaaatataaattttgtaatcgataaatactttacccttgttggtaaaactaatcttggatatgtagaatttatttgtgacaataataaaaatatagatatatattttggtgaatggaaaacatcgtcatctaaaagcactatatttagcggaaatggtagaaatgttgtagtagagcctatatataatcctgatacgggtgaagatatatctacttcactagatttttcctatgaacctctctatggaatagatagatatatcaataaagtattgatagcacctgatttatatacaagtttaataaatattaataccaattattattcaaatgagtactaccctgagattatagttcttaacccaaatacattccacaaaaaagtaaatataaatttagatagttcttcttttgagtataaatggtctacagaaggaagtgactttattttagttagatacttagaagaaagtaataaaaaaatattacaaaaaataagaatcaaaggtatcttatctaatactcaatcatttaataaaatgagtatagattttaaagatattaaaaaactatcattaggatatataatgagtaattttaaatcatttaattctgaaaatgaattagatagagatcatttaggatttaaaataatagataataaaacttattactatgatgaagatagtaaattagttaaaggattaatcaatataaataattcattattctattttgatcctatagaatttaacttagtaactggatggcaaactatcaatggtaaaaaatattattttgatataaatactggagcagctttaattagttataaaattattaatggtaaacacttttattttaataatgatggtgtgatgcagttgggagtatttaaaggacctgatggatttgaatattttgcacctgccaatactcaaaataataacatagaaggtcaggctatagtttatcaaagtaaattcttaactttgaatggcaaaaaatattattttgataatgactcaaaagcagtcactggatggagaattattaacaatgagaaatattactttaatcctaataatgctattgctgcagtcggattgcaagtaattgacaataataagtattatttcaatcctgacactgctatcatctcaaaaggttggcagactgttaatggtagtagatactactttgatactgataccgctattgcctttaatggttataaaactattgatggtaaacacttttattttgatagtgattgtgtagtgaaaataggtgtgtttagtacctctaatggatttgaatattttgcacctgctaatacttataataataacatagaaggtcaggctatagtttatcaaagtaaattcttaactttgaatggtaaaaaatattactttgataataactcaaaagcagttaccggatggcaaactattgatagtaaaaaatattactttaatactaacactgctgaagcagctactggatggcaaactattgatggtaaaaaatattactttaatactaacactgctgaagcagctactggatggcaaactattgatggtaaaaaatattactttaatactaacactgctatagcttcaactggttatacaattattaatggtaaacatttttattttaatactgatggtattatgcagataggagtgtttaaaggacctaatggatttgaatattttgcacctgctaatacggatgctaacaacatagaaggtcaagctatactttaccaaaatgaattcttaactttgaatggtaaaaaatattactttggtagtgactcaaaagcagttactggatggagaattattaacaataagaaatattactttaatcctaataatgctattgctgcaattcatctatgcactataaataatgacaagtattactttagttatgatggaattcttcaaaatggatatattactattgaaagaaataatttctattttgatgctaataatgaatctaaaatggtaacaggagtatttaaaggacctaatggatttgagtattttgcacctgctaatactcacaataataacatagaaggtcaggctatagtttaccagaacaaattcttaactttgaatggcaaaaaatattattttgataatgactcaaaagcagttactggatggcaaaccattgatggtaaaaaatattactttaatcttaacactgctgaagcagctactggatggcaaactattgatggtaaaaaatattactttaatcttaacactgctgaagcagctactggatggcaaactattgatggtaaaaaatattactttaatactaacactttcatagcctcaactggttatacaagtattaatggtaaacatttttattttaatactgatggtattatgcagataggagtgtttaaaggacctaatggatttgaatactttgcacctgctaatactcataataataacatagaaggtcaagctatactttaccaaaataaattcttaactttgaatggtaaaaaatattactttggtagtgactcaaaagcagttaccggattgcgaactattgatggtaaaaaatattactttaatactaacactgctgttgcagttactggatggcaaactattaatggtaaaaaatactactttaatactaacacttctatagcttcaactggttatacaattattagtggtaaacatttttattttaatactgatggtattatgcagataggagtgtttaaaggacctgatggatttgaatactttgcacctgctaatacagatgctaacaatatagaaggtcaagctatacgttatcaaaatagattcctatatttacatgacaatatatattattttggtaataattcaaaagcagctactggttgggtaactattgatggtaatagatattacttcgagcctaatacagctatgggtgcgaatggttataaaactattgataataaaaatttttactttagaaatggtttacctcagataggagtgtttaaagggtctaatggatttgaatactttgcacctgctaatacggatgctaacaatatagaaggtcaagctatacgttatcaaaatagattcctacatttacttggaaaaatatattactttggtaataattcaaaagcagttactggatggcaaactattaatggtaaagtatattactttatgcctgatactgctatggctgcagctggtggacttttcgagattgatggtgttatatatttctttggtgttgatggagtaaaagcccctgggatatatggctaa

SEQ ID NO: 10 - DNA, 7101 bp, Clostridium difficile
  source 1..7101: mol_type = genomic DNA
atgagtttagttaatagaaaacagttagaaaaaatggcaaatgtaagatttcgtactcaagaagatgaatatgttgcaatattggatgctttagaagaatatcataatatgtcagagaatactgtagtcgaaaaatatttaaaattaaaagatataaatagtttaacagatatttatatagatacatataaaaaatctggtagaaataaagccttaaaaaaatttaaggaatatctagttacagaagtattagagctaaagaataataatttaactccagttgagaaaaatttacattttgtttggattggaggtcaaataaatgacactgctattaattatataaatcaatggaaagatgtaaatagtgattataatgttaatgttttttatgatagtaatgcatttttgataaacacattgaaaaaaactgtagtagaatcagcaataaatgatacacttgaatcatttagagaaaacttaaatgaccctagatttgactataataaattcttcagaaaacgtatggaaataatttatgataaacagaaaaatttcataaactactataaagctcaaagagaagaaaatcctgaacttataattgatgatattgtaaagacatatctttcaaatgagtattcaaaggagatagatgaacttaatacctatattgaagaatccttaaataaaattacacagaatagtggaaatgatgttagaaactttgaagaatttaaaaatggagagtcattcaacttatatgaacaagagttggtagaaaggtggaatttagctgctgcttctgacatattaagaatatctgcattaaaagaaattggtggtatgtatttagatgttgatatgttaccaggaatacaaccagacttatttgagtctatagagaaacctagttcagtaacagtggatttttgggaaatgacaaagttagaagctataatgaaatacaaagaatatataccagaatatacctcagaacattttgacatgttagacgaagaagttcaaagtagttttgaatctgttctagcttctaagtcagataaatcagaaatattctcatcacttggtgatatggaggcatcaccactagaagttaaaattgcatttaatagtaagggtattataaatcaagggctaatttctgtgaaagactcatattgtagcaatttaatagtaaaacaaatcgagaatagatataaaatattgaataatagtttaaatccagctattagcgaggataatgattttaatactacaacgaatacctttattgatagtataatggctgaagctaatgcagataatggtagatttatgatggaactaggaaagtatttaagagttggtttcttcccagatgttaaaactactattaacttaagtggccctgaagcatatgcggcagcttatcaagatttattaatgtttaaagaaggcagtatgaatatccatttgatagaagctgatttaagaaactttgaaatctctaaaactaatatttctcaatcaactgaacaagaaatggctagcttatggtcatttgacgatgcaagagctaaagctcaatttgaagaatataaaaggaattattttgaaggttctcttggtgaagatgataatcttgatttttctcaaaatatagtagttgacaaggagtatcttttagaaaaaatatcttcattagcaagaagttcagagagaggatatatacactatattgttcagttacaaggagataaaattagttatgaagcagcatgtaacttatttgcaaagactccttatgatagtgtactgtttcagaaaaatatagaagattcagaaattgcatattattataatcctggagatggtgaaatacaagaaatagacaagtataaaattccaagtataatttctgatagacctaagattaaattaacatttattggtcatggtaaagatgaatttaatactgatatatttgcaggttttgatgtagattcattatccacagaaatagaagcagcaatagatttagctaaagaggatatttctcctaagtcaatagaaataaatttattaggatgtaatatgtttagctactctatcaacgtagaggagacttatcctggaaaattattacttaaagttaaagataaaatatcagaattaatgccatctataagtcaagactctattatagtaagtgcaaatcaatatgaagttagaataaatagtgaaggaagaagagaattattggatcattctggtgaatggataaataaagaagaaagtattataaaggatatttcatcaaaagaatatatatcatttaatcctaaagaaaataaaattacagtaaaatctaaaaatttacctgagctatctacattattacaagaaattagaaataattctaattcaagtgatattgaactagaagaaaaagtaatgttaacagaatgtgagataaatgttatttcaaatatagatacgcaaattgttgaggaaaggattgaagaagctaagaatttaacttctgactctattaattatataaaagatgaatttaaactaatagaatctatttctgatgcactatgtgacttaaaacaacagaatgaattagaagattctcattttatatcttttgaggacatatcagagactgatgagggatttagtataagatttattaataaagaaactggagaatctatatttgtagaaactgaaaaaacaatattctctgaatatgctaatcatataactgaagagatttctaagataaaaggtactatatttgatactgtaaatggtaagttagtaaaaaaagtaaatttagatactacacacgaagtaaatactttaaatgctgcattttttatacaatcattaatagaatataatagttctaaagaatctcttagtaatttaagtgtagcaatgaaagtccaagtttacgctcaattatttagtactggtttaaatactattacagatgcagccaaagttgttgaattagtatcaactgcattagatgaaactatagacttacttcctacattatctgaaggattacctataattgcaactattatagatggtgtaagtttaggtgcagcaatcaaagagctaagtgaaacgagtgacccattattaagacaagaaatagaagctaagataggtataatggcagtaaatttaacaacagctacaactgcaatcattacttcatctttggggatagctagtggatttagtatacttttagttcctttagcaggaatttcagcaggtataccaagcttagtaaacaatgaacttgtacttcgagataaggcaacaaaggttgtagattattttaaacatgtttcattagttgaaactgaaggagtatttactttattagatgataaaataatgatgccacaagatgatttagtgatatcagaaatagattttaataataattcaatagttttaggtaaatgtgaaatctggagaatggaaggtggttcaggtcatactgtaactgatgatatagatcacttcttttcagcaccatcaataacatatagagagccacacttatctatatatgacgtattggaagtacaaaaagaagaacttgatttgtcaaaagatttaatggtattacctaatgctccaaatagagtatttgcttgggaaacaggatggacaccaggtttaagaagcttagaaaatgatggcacaaaactgttagaccgtataagagataactatgaaggtgagttttattggagatattttgcttttatagctgatgctttaataacaacattaaaaccaagatatgaagatactaatataagaataaatttagatagtaatactagaagttttatagttccaataataactacagaatatataagagaaaaattatcatattctttctatggttcaggaggaacttatgcattgtctctttctcaatataatatgggtataaatatagaattaagtgaaagtgatgtttggattatagatgttgataatgttgtgagagatgtaactatagaatctgataaaattaaaaaaggtgatttaatagaaggtattttatctacactaagtattgaagagaataaaattatcttaaatagccatgagattaatttttctggtgaggtaaatggaagtaatggatttgtttctttaacattttcaattttagaaggaataaatgcaattatagaagttgatttattatctaaatcatataaattacttatttctggcgaattaaaaatattgatgttaaattcaaatcatattcaacagaaaatagattatataggattcaatagcgaattacagaaaaatataccatatagctttgtagatagtgaaggaaaagagaatggttttattaatggttcaacaaaagaaggtttatttgtatctgaattacctgatgtagttcttataagtaaggtttatatggatgatagtaagccttcatttggatattatagtaataatttgaaagatgtcaaagttataactaaagataatgttaatatattaacaggttattatcttaaggatgatataaaaatctctctttctttgactctacaagatgaaaaaactataaagttaaatagtgtgcatttagatgaaagtggagtagctgagattttgaagttcatgaatagaaaaggtaatacaaatacttcagattctttaatgagctttttagaaagtatgaatataaaaagtattttcgttaatttcttacaatctaatattaagtttatattagatgctaattttataataagtggtactacttctattggccaatttgagtttatttgtgatgaaaatgataatatacaaccatatttcattaagtttaatacactagaaactaattatactttatatgtaggaaatagacaaaatatgatagtggaaccaaattatgatttagatgattctggagatatatcttcaactgttatcaatttctctcaaaagtatctttatggaatagacagttgtgttaataaagttgtaatttcaccaaatatttatacagatgaaataaatataacgcctgtatatgaaacaaataatacttatccagaagttattgtattagatgcaaattatataaatgaaaaaataaatgttaatatcaatgatctatctatacgatatgtatggagtaatgatggtaatgattttattcttatgtcaactagtgaagaaaataaggtgtcacaagttaaaataagattcgttaatgtttttaaagataagactttggcaaataagctatcttttaactttagtgataaacaagatgtacctgtaagtgaaataatcttatcatttacaccttcatattatgaggatggattgattggctatgatttgggtctagtttctttatataatgagaaattttatattaataactttggaatgatggtatctggattaatatatattaatgattcattatattattttaaaccaccagtaaataatttgataactggatttgtgactgtaggcgatgataaatactactttaatccaattaatggtggagctgcttcaattggagagacaataattgatgacaaaaattattatttcaaccaaagtggagtgttacaaacaggtgtatttagtacagaagatggatttaaatattttgccccagctaatacacttgatgaaaacctagaaggagaagcaattgattttactggaaaattaattattgacgaaaatatttattattttgatgataattatagaggagctgtagaatggaaagaattagatggtgaaatgcactattttagcccagaaacaggtaaagcttttaaaggtctaaatcaaataggtgattataaatactatttcaattctgatggagttatgcaaaaaggatttgttagtataaatgataataaacactattttgatgattctggtgttatgaaagtaggttacactgaaatagatggcaagcatttctactttgctgaaaacggagaaatgcaaataggagtatttaatacagaagatggatttaaatattttgctcatcataatgaagatttaggaaatgaagaaggtgaagaaatctcatattctggtatattaaatttcaataataaaatttactattttgatgattcatttacagctgtagttggatggaaagatttagaggatggttcaaagtattattttgatgaagatacagcagaagcatatataggtttgtcattaataaatgatggtcaatattattttaatgatgatggaattatgcaagttggatttgtcactataaatgataaagtcttctacttctctgactctggaattatagaatctggagtacaaaacatagatgacaattatttctatatagatgataatggtatagttcaaattggtgtatttgatacttcagatggatataaatattttgcacctgctaatactgtaaatgataatatttacggacaagcagttgaatatagtggtttagttagagttggtgaagatgtatattattttggagaaacatatacaattgagactggatggatatatgatatggaaaatgaaagtgataaatattatttcaatccagaaactaaaaaagcatgcaaaggtattaatttaattgatgatataaaatattattttgatgagaagggcataatgagaacgggtcttatatcatttgaaaataataattattactttaatgagaatggtgaaatgcaatttggttatataaatatagaagataagatgttctattttggtgaagatggtgtcatgcagattggagtatttaatacaccagatggatttaaatactttgcacatcaaaatactttggatgagaattttgagggagaatcaataaactatactggttggttagatttagatgaaaagagatattattttacagatgaatatattgcagcaactggttcagttattattgatggtgaggagtattattttgatcctgatacagctcaattagtgattagtgaatag

SEQ ID NO: 11 - DNA, 8133 bp, synthetic construct
  misc_feature 1..8133: note = Synthetic nucleotide sequence: TcdA gene (D285A D287A mutations)
  source 1..8133: mol_type = other DNA
atgtctttaatatctaaagaagagttaataaaactcgcatatagcattagaccaagagaaaatgagtataaaactatactaactaatttagacgaatataataagttaactacaaacaataatgaaaataaatatttacaattaaaaaaactaaatgaatcaattgatgtttttatgaataaatataaaacttcaagcagaaatagagcactctctaatctaaaaaaagatatattaaaagaagtaattcttattaaaaattccaatacaagccctgtagaaaaaaatttacattttgtatggataggtggagaagtcagtgatattgctcttgaatacataaaacaatgggctgatattaatgcagaatataatattaaactgtggtatgatagtgaagcattcttagtaaatacactaaaaaaggctatagttgaatcttctaccactgaagcattacagctactagaggaagagattcaaaatcctcaatttgataatatgaaattttacaaaaaaaggatggaatttatatatgatagacaaaaaaggtttataaattattataaatctcaaatcaataaacctacagtacctacaatagatgatattataaagtctcatctagtatctgaatataatagagatgaaactgtattagaatcatatagaacaaattctttgagaaaaataaatagtaatcatgggatagatatcagggctaatagtttgtttacagaacaagagttattaaatatttatagtcaggagttgttaaatcgtggaaatttagctgcagcatctgacatagtaagattattagccctaaaaaattttggcggagtatatttagcagttgcaatgcttccaggtattcactctgatttatttaaaacaatatctagacctagctctattggactagaccgttgggaaatgataaaattagaggctattatgaagtataaaaaatatataaataattatacatcagaaaactttgataaacttgatcaacaattaaaagataattttaaactcattatagaaagtaaaagtgaaaaatctgagatattttctaaattagaaaatttaaatgtatctgatcttgaaattaaaatagctttcgctttaggcagtgttataaatcaagccttgatatcaaaacaaggttcatatcttactaacctagtaatagaacaagtaaaaaatagatatcaatttttaaaccaacaccttaacccagccatagagtctgataataacttcacagatactactaaaatttttcatgattcattatttaattcagctaccgcagaaaactctatgtttttaacaaaaatagcaccatacttacaagtaggttttatgccagaagctcgctccacaataagtttaagtggtccaggagcttatgcgtcagcttactatgatttcataaatttacaagaaaatactatagaaaaaactttaaaagcatcagatttaatagaatttaaattcccagaaaataatctatctcaattgacagaacaagaaataaatagtctatggagctttgatcaagcaagtgcaaaatatcaatttgagaaatatgtaagagattatactggtggatctctttctgaagacaatggggtagactttaataaaaatactgccctcgacaaaaactatttattaaataataaaattccatcaaacaatgtagaagaagctggaagtaaaaattatgttcattatatcatacagttacaaggagatgatataagttatgaagcaacatgcaatttattttctaaaaatcctaaaaatagtattattatacaacgaaatatgaatgaaagtgcaaaaagctactttttaagtgatgatggagaatctattttagaattaaataaatataggatacctgaaagattaaaaaataaggaaaaagtaaaagtaacctttattggacatggtaaagatgaattcaacacaagcgaatttgctagattaagtgtagattcactttccaatgagataagttcatttttagataccataaaattagatatatcacctaaaaatgtagaagtaaacttacttggatgtaatatgtttagttatgattttaatgttgaagaaacttatcctgggaagttgctattaagtattatggacaaaattacttccactttacctgatgtaaataaaaattctattactataggagcaaatcaatatgaagtaagaattaatagtgagggaagaaaagaacttctggctcactcaggtaaatggataaataaagaagaagctattatgagcgatttatctagtaaagaatacattttttttgattctatagataataagctaaaagcaaagtccaagaatattccaggattagcatcaatatcagaagatataaaaacattattacttgatgcaagtgttagtcctgatacaaaatttattttaaataatcttaagcttaatattgaatcttctattggtgattacatttattatgaaaaattagagcctgttaaaaatataattcacaattctatagatgatttaatagatgagttcaatctacttgaaaatgtatctgatgaattatatgaattaaaaaaattaaataatctagatgagaagtatttaatatcttttgaagatatctcaaaaaataattcaacttactctgtaagatttattaacaaaagtaatggtgagtcagtttatgtagaaacagaaaaagaaattttttcaaaatatagcgaacatattacaaaagaaataagtactataaagaatagtataattacagatgttaatggtaatttattggataatatacagttagatcatacttctcaagttaatacattaaacgcagcattctttattcaatcattaatagattatagtagcaataaagatgtactgaatgatttaagtacctcagttaaggttcaactttatgctcaactatttagtacaggtttaaatactatatatgactctatccaattagtaaatttaatatcaaatgcagtaaatgatactataaatgtactacctacaataacagaggggatacctattgtatctactatattagacggaataaacttaggtgcagcaattaaggaattactagacgaacatgacccattactaaaaaaagaattagaagctaaggtgggtgttttagcaataaatatgtcattatctatagctgcaactgtagcttcaattgttggaataggtgctgaagttactattttcttattacctatagctggtatatctgcaggaataccttcattagttaataatgaattaatattgcatgataaggcaacttcagtggtaaactattttaatcatttgtctgaatctaaaaaatatggccctcttaaaacagaagatgataaaattttagttcctattgatgatttagtaatatcagaaatagattttaataataattcgataaaactaggaacatgtaatatattagcaatggaggggggatcaggacacacagtgactggtaatatagatcactttttctcatctccatctataagttctcatattccttcattatcaatttattctgcaataggtatagaaacagaaaatctagatttttcaaaaaaaataatgatgttacctaatgctccttcaagagtgttttggtgggaaactggagcagttccaggtttaagatcattggaaaatgacggaactagattacttgattcaataagagatttatacccaggtaaattttactggagattctatgcttttttcgattatgcaataactacattaaaaccagtttatgaagacactaatattaaaattaaactagataaagatactagaaacttcataatgccaactataactactaacgaaattagaaacaaattatcttattcatttgatggagcaggaggaacttactctttattattatcttcatatccaatatcaacgaatataaatttatctaaagatgatttatggatatttaatattgataatgaagtaagagaaatatctatagaaaatggtactattaaaaaaggaaagttaataaaagatgttttaagtaaaattgatataaataaaaataaacttattataggcaatcaaacaatagatttttcaggcgatatagataataaagatagatatatattcttgacttgtgagttagatgataaaattagtttaataatagaaataaatcttgttgcaaaatcttatagtttgttattgtctggggataaaaattatttgatatccaatttatctaatattattgagaaaatcaatactttaggactagatagtaaaaatatagcgtacaattacactgatgaatctaataataaatattttggagctatatctaaaacaagtcaaaaaagcataatacattataaaaaagacagtaaaaatatattagaattttataatgacagtacattagaatttaacagtaaagattttattgctgaagatataaatgtatttatgaaagatgatattaatactataacaggaaaatactatgttgataataatactgataaaagtatagatttctctatttctttagttagtaaaaatcaagtaaaagtaaatggattatatttaaatgaatccgtatactcatcttaccttgattttgtgaaaaattcagatggacaccataatacttctaattttatgaatttatttttggacaatataagtttctggaaattgtttgggtttgaaaatataaattttgtaatcgataaatactttacccttgttggtaaaactaatcttggatatgtagaatttatttgtgacaataataaaaatatagatatatattttggtgaatggaaaacatcgtcatctaaaagcactatatttagcggaaatggtagaaatgttgtagtagagcctatatataatcctgatacgggtgaagatatatctacttcactagatttttcctatgaacctctctatggaatagatagatatatcaataaagtattgatagcacctgatttatatacaagtttaataaatattaataccaattattattcaaatgagtactaccctgagattatagttcttaacccaaatacattccacaaaaaagtaaatataaatttagatagttcttcttttgagtataaatggtctacagaaggaagtgactttattttagttagatacttagaagaaagtaataaaaaaatattacaaaaaataagaatcaaaggtatcttatctaatactcaatcatttaataaaatgagtatagattttaaagatattaaaaaactatcattaggatatataatgagtaattttaaatcatttaattctgaaaatgaattagatagagatcatttaggatttaaaataatagataataaaacttattactatgatgaagatagtaaattagttaaaggattaatcaatataaataattcattattctattttgatcctatagaatttaacttagtaactggatggcaaactatcaatggtaaaaaatattattttgatataaatactggagcagctttaattagttataaaattattaatggtaaacacttttattttaataatgatggtgtgatgcagttgggagtatttaaaggacctgatggatttgaatattttgcacctgccaatactcaaaataataacatagaaggtcaggctatagtttatcaaagtaaattcttaactttgaatggcaaaaaatattattttgataatgactcaaaagcagtcactggatggagaattattaacaatgagaaatattactttaatcctaataatgctattgctgcagtcggattgcaagtaattgacaataataagtattatttcaatcctgacactgctatcatctcaaaaggttggcagactgttaatggtagtagatactactttgatactgataccgctattgcctttaatggttataaaactattgatggtaaacacttttattttgatagtgattgtgtagtgaaaataggtgtgtttagtacctctaatggatttgaatattttgcacctgctaatacttataataataacatagaaggtcaggctatagtttatcaaagtaaattcttaactttgaatggtaaaaaatattactttgataataactcaaaagcagttaccggatggcaaactattgatagtaaaaaatattactttaatactaacactgctgaagcagctactggatggcaaactattgatggtaaaaaatattactttaatactaacactgctgaagcagctactggatggcaaactattgatggtaaaaaatattactttaatactaacactgctatagcttcaactggttatacaattattaatggtaaacatttttattttaatactgatggtattatgcagataggagtgtttaaaggacctaatggatttgaatattttgcacctgctaatacggatgctaacaacatagaaggtcaagctatactttaccaaaatgaattcttaactttgaatggtaaaaaatattactttggtagtgactcaaaagcagttactggatggagaattattaacaataagaaatattactttaatcctaataatgctattgctgcaattcatctatgcactataaataatgacaagtattactttagttatgatggaattcttcaaaatggatatattactattgaaagaaataatttctattttgatgctaataatgaatctaaaatggtaacaggagtatttaaaggacctaatggatttgagtattttgcacctgctaatactcacaataataacatagaaggtcaggctatagtttaccagaacaaattcttaactttgaatggcaaaaaatattattttgataatgactcaaaagcagttactggatggcaaaccattgatggtaaaaaatattactttaatcttaacactgctgaagcagctactggatggcaaactattgatggtaaaaaatattactttaatcttaacactgctgaagcagctactggatggcaaactattgatggtaaaaaatattactttaatactaacactttcatagcctcaactggttatacaagtattaatggtaaacatttttattttaatactgatggtattatgcagataggagtgtttaaaggacctaatggatttgaatactttgcacctgctaatactcataataataacatagaaggtcaagctatactttaccaaaataaattcttaactttgaatggtaaaaaatattactttggtagtgactcaaaagcagttaccggattgcgaactattgatggtaaaaaatattactttaatactaacactgctgttgcagttactggatggcaaactattaatggtaaaaaatactactttaatactaacacttctatagcttcaactggttatacaattattagtggtaaacatttttattttaatactgatggtattatgcagataggagtgtttaaaggacctgatggatttgaatactttgcacctgctaatacagatgctaacaatatagaaggtcaagctatacgttatcaaaatagattcctatatttacatgacaatatatattattttggtaataattcaaaagcagctactggttgggtaactattgatggtaatagatattacttcgagcctaatacagctatgggtgcgaatggttataaaactattgataataaaaatttttactttagaaatggtttacctcagataggagtgtttaaagggtctaatggatttgaatactttgcacctgctaatacggatgctaacaatatagaaggtcaagctatacgttatcaaaatagattcctacatttacttggaaaaatatattactttggtaataattcaaaagcagttactggatggcaaactattaatggtaaagtatattactttatgcctgatactgctatggctgcagcaggtggacttttcgagattgatggtgttatatatttctttggtgttgatggagtaaaagcccctgggatatatggctaa

SEQ ID NO: 12 - DNA, 8133 bp, synthetic construct
  misc_feature 1..8133: note = Synthetic nucleotide sequence: TcdA gene (D285A D287A C700A mutations)
  source 1..8133: mol_type = other DNA
atgtctttaatatctaaagaagagttaataaaactcgcatatagcattagaccaagagaaaatgagtataaaactatactaactaatttagacgaatataataagttaactacaaacaataatgaaaataaatatttacaattaaaaaaactaaatgaatcaattgatgtttttatgaataaatataaaacttcaagcagaaatagagcactctctaatctaaaaaaagatatattaaaagaagtaattcttattaaaaattccaatacaagccctgtagaaaaaaatttacattttgtatggataggtggagaagtcagtgatattgctcttgaatacataaaacaatgggctgatattaatgcagaatataatattaaactgtggtatgatagtgaagcattcttagtaaatacactaaaaaaggctatagttgaatcttctaccactgaagcattacagctactagaggaagagattcaaaatcctcaatttgataatatgaaattttacaaaaaaaggatggaatttatatatgatagacaaaaaaggtttataaattattataaatctcaaatcaataaacctacagtacctacaatagatgatattataaagtctcatctagtatctgaatataatagagatgaaactgtattagaatcatatagaacaaattctttgagaaaaataaatagtaatcatgggatagatatcagggctaatagtttgtttacagaacaagagttattaaatatttatagtcaggagttgttaaatcgtggaaatttagctgcagcatctgacatagtaagattattagccctaaaaaattttggcggagtatatttagcagttgcaatgcttccaggtattcactctgatttatttaaaacaatatctagacctagctctattggactagaccgttgggaaatgataaaattagaggctattatgaagtataaaaaatatataaataattatacatcagaaaactttgataaacttgatcaacaattaaaagataattttaaactcattatagaaagtaaaagtgaaaaatctgagatattttctaaattagaaaatttaaatgtatctgatcttgaaattaaaatagctttcgctttaggcagtgttataaatcaagccttgatatcaaaacaaggttcatatcttactaacctagtaatagaacaagtaaaaaatagatatcaatttttaaaccaacaccttaacccagccatagagtctgataataacttcacagatactactaaaatttttcatgattcattatttaattcagctaccgcagaaaactctatgtttttaacaaaaatagcaccatacttacaagtaggttttatgccagaagctcgctccacaataagtttaagtggtccaggagcttatgcgtcagcttactatgatttcataaatttacaagaaaatactatagaaaaaactttaaaagcatcagatttaatagaatttaaattcccagaaaataatctatctcaattgacagaacaagaaataaatagtctatggagctttgatcaagcaagtgcaaaatatcaatttgagaaatatgtaagagattatactggtggatctctttctgaagacaatggggtagactttaataaaaatactgccctcgacaaaaactatttattaaataataaaattccatcaaacaatgtagaagaagctggaagtaaaaattatgttcattatatcatacagttacaaggagatgatataagttatgaagcaacatgcaatttattttctaaaaatcctaaaaatagtattattatacaacgaaatatgaatgaaagtgcaaaaagctactttttaagtgatgatggagaatctattttagaattaaataaatataggatacctgaaagattaaaaaataaggaaaaagtaaaagtaacctttattggacatggtaaagatgaattcaacacaagcgaatttgctagattaagtgtagattcactttccaatgagataagttcatttttagataccataaaattagatatatcacctaaaaatgtagaagtaaacttacttggagctaatatgtttagttatgattttaatgttgaagaaacttatcctgggaagttgctattaagtattatggacaaaattacttccactttacctgatgtaaataaaaattctattactataggagcaaatcaatatgaagtaagaattaatagtgagggaagaaaagaacttctggctcactcaggtaaatggataaataaagaagaagctattatgagcgatttatctagtaaagaatacattttttttgattctatagataataagctaaaagcaaagtccaagaatattccaggattagcatcaatatcagaagatataaaaacattattacttgatgcaagtgttagtcctgatacaaaatttattttaaataatcttaagcttaatattgaatcttctattggtgattacatttattatgaaaaattagagcctgttaaaaatataattcacaattctatagatgatttaatagatgagttcaatctacttgaaaatgtatctgatgaattatatgaattaaaaaaattaaataatctagatgagaagtatttaatatcttttgaagatatctcaaaaaataattcaacttactctgtaagatttattaacaaaagtaatggtgagtcagtttatgtagaaacagaaaaagaaattttttcaaaatatagcgaacatattacaaaagaaataagtactataaagaatagtataattacagatgttaatggtaatttattggataatatacagttagatcatacttctcaagttaatacattaaacgcagcattctttattcaatcattaatagattatagtagcaataaagatgtactgaatgatttaagtacctcagttaaggttcaactttatgctcaactatttagtacaggtttaaatactatatatgactctatccaattagtaaatttaatatcaaatgcagtaaatgatactataaatgtactacctacaataacagaggggatacctattgtatctactatattagacggaataaacttaggtgcagcaattaaggaattactagacgaacatgacccattactaaaaaaagaattagaagctaaggtgggtgttttagcaataaatatgtcattatctatagctgcaactgtagcttcaattgttggaataggtgctgaagttactattttcttattacctatagctggtatatctgcaggaataccttcattagttaataatgaattaatattgcatgataaggcaacttcagtggtaaactattttaatcatttgtctgaatctaaaaaatatggccctcttaaaacagaagatgataaaattttagttcctattgatgatttagtaatatcagaaatagattttaataataattcgataaaactaggaacatgtaatatattagcaatggaggggggatcaggacacacagtgactggtaatatagatcactttttctcatctccatctataagttctcatattccttcattatcaatttattctgcaataggtatagaaacagaaaatctagatttttcaaaaaaaataatgatgttacctaatgctccttcaagagtgttttggtgggaaactggagcagttccaggtttaagatcattggaaaatgacggaactagattacttgattcaataagagatttatacccaggtaaattttactggagattctatgcttttttcgattatgcaataactacattaaaaccagtttatgaagacactaatattaaaattaaactagataaagatactagaaacttcataatgccaactataactactaacgaaattagaaacaaattatcttattcatttgatggagcaggaggaacttactctttattattatcttcatatccaatatcaacgaatataaatttatctaaagatgatttatggatatttaatattgataatgaagtaagagaaatatctatagaaaatggtactattaaaaaaggaaagttaataaaagatgttttaagtaaaattgatataaataaaaataaacttattataggcaatcaaacaatagatttttcaggcgatatagataataaagatagatatatattcttgacttgtgagttagatgataaaattagtttaataatagaaataaatcttgttgcaaaatcttatagtttgttattgtctggggataaaaattatttgatatccaatttatctaatattattgagaaaatcaatactttaggactagatagtaaaaatatagcgtacaattacactgatgaatctaataataaatattttggagctatatctaaaacaagtcaaaaaagcataatacattataaaaaagacagtaaaaatatattagaattttataatgacagtacattagaatttaacagtaaagattttattgctgaagatataaatgtatttatgaaagatgatattaatactataacaggaaaatactatgttgataataatactgataaaagtatagatttctctatttctttagttagtaaaaatcaagtaaaagtaaatggattatatttaaatgaatccgtatactcatcttaccttgattttgtgaaaaattcagatggacaccataatacttctaattttatgaatttatttttggacaatataagtttctggaaattgtttgggtttgaaaatataaattttgtaatcgataaatactttacccttgttggtaaaactaatcttggatatgtagaatttatttgtgacaataataaaaatatagatatatattttggtgaatggaaaacatcgtcatctaaaagcactatatttagcggaaatggtagaaatgttgtagtagagcctatatataatcctgatacgggtgaagatatatctacttcactagatttttcctatgaacctctctatggaatagatagatatatcaataaagtattgatagcacctgatttatatacaagtttaataaatattaataccaattattattcaaatgagtactaccctgagattatagttcttaacccaaatacattccacaaaaaagtaaatataaatttagatagttcttcttttgagtataaatggtctacagaaggaagtgactttattttagttagatacttagaagaaagtaataaaaaaatattacaaaaaataagaatcaaaggtatcttatctaatactcaatcatttaataaaatgagtatagattttaaagatattaaaaaactatcattaggatatataatgagtaattttaaatcatttaattctgaaaatgaattagatagagatcatttaggatttaaaataatagataataaaacttattactatgatgaagatagtaaattagttaaaggattaatcaatataaataattcattattctattttgatcctatagaatttaacttagtaactggatggcaaactatcaatggtaaaaaatattattttgatataaatactggagcagctttaattagttataaaattattaatggtaaacacttttattttaataatgatggtgtgatgcagttgggagtatttaaaggacctgatggatttgaatattttgcacctgccaatactcaaaataataacatagaaggtcaggctatagtttatcaaagtaaattcttaactttgaatggcaaaaaatattattttgataatgactcaaaagcagtcactggatggagaattattaacaatgagaaatattactttaatcctaataatgctattgctgcagtcggattgcaagtaattgacaataataagtattatttcaatcctgacactgctatcatctcaaaaggttggcagactgttaatggtagtagatactactttgatactgataccgctattgcctttaatggttataaaactattgatggtaaacacttttattttgatagtgattgtgtagtgaaaataggtgtgtttagtacctctaatggatttgaatattttgcacctgctaatacttataataataacatagaaggtcaggctatagtttatcaaagtaaattcttaactttgaatggtaaaaaatattactttgataataactcaaaagcagttaccggatggcaaactattgatagtaaaaaatattactttaatactaacactgctgaagcagctactggatggcaaactattgatggtaaaaaatattactttaatactaacactgctgaagcagctactggatggcaaactattgatggtaaaaaatattactttaatactaacactgctatagcttcaactggttatacaattattaatggtaaacatttttattttaatactgatggtattatgcagataggagtgtttaaaggacctaatggatttgaatattttgcacctgctaatacggatgctaacaacatagaaggtcaagctatactttaccaaaatgaattcttaactttgaatggtaaaaaatattactttggtagtgactcaaaagcagttactggatggagaattattaacaataagaaatattactttaatcctaataatgctattgctgcaattcatctatgcactataaataatgacaagtattactttagttatgatggaattcttcaaaatggatatattactattgaaagaaataatttctattttgatgctaataatgaatctaaaatggtaacaggagtatttaaaggacctaatggatttgagtattttgcacctgctaatactcacaataataacatagaaggtcaggctatagtttaccagaacaaattcttaactttgaatggcaaaaaatattattttgataatgactcaaaagcagttactggatggcaaaccattgatggtaaaaaatattactttaatcttaacactgctgaagcagctactggatggcaaactattgatggtaaaaaatattactttaatcttaacactgctgaagcagctactggatggcaaactattgatggtaaaaaatattactttaatactaacactttcatagcctcaactggttatacaagtattaatggtaaacatttttattttaatactgatggtattatgcagataggagtgtttaaaggacctaatggatttgaatactttgcacctgctaatactcataataataacatagaaggtcaagctatactttaccaaaataaattcttaactttgaatggtaaaaaatattactttggtagtgactcaaaagcagttaccggattgcgaactattgatggtaaaaaatattactttaatactaacactgctgttgcagttactggatggcaaactattaatggtaaaaaatactactttaatactaacacttctatagcttcaactggttatacaattattagtggtaaacatttttattttaatactgatggtattatgcagataggagtgtttaaaggacctgatggatttgaatactttgcacctgctaatacagatgctaacaatatagaaggtcaagctatacgttatcaaaatagattcctatatttacatgacaatatatattattttggtaataattcaaaagcagctactggttgggtaactattgatggtaatagatattacttcgagcctaatacagctatgggtgcgaatggttataaaactattgataataaaaatttttactttagaaatggtttacctcagataggagtgtttaaagggtctaatggatttgaatactttgcacctgctaatacggatgctaacaatatagaaggtcaagctatacgttatcaaaatagattcctacatttacttggaaaaatatattactttggtaataattcaaaagcagttactggatggcaaactattaatggtaaagtatattactttatgcctgatactgctatggctgcagcaggtggacttttcgagattgatggtgttatatatttctttggtgttgatggagtaaaagcccctgggatatatggctaa

SEQ ID NO: 13 - DNA, 7101 bp, synthetic construct
  misc_feature 1..7101: note = Synthetic nucleotide sequence: TcdB (D286A D288A mutations)
  source 1..7101: mol_type = other DNA
atgagtttagttaatagaaaacagttagaaaaaatggcaaatgtaagatttcgtactcaagaagatgaatatgttgcaatattggatgctttagaagaatatcataatatgtcagagaatactgtagtcgaaaaatatttaaaattaaaagatataaatagtttaacagatatttatatagatacatataaaaaatctggtagaaataaagccttaaaaaaatttaaggaatatctagttacagaagtattagagctaaagaataataatttaactccagttgagaaaaatttacattttgtttggattggaggtcaaataaatgacactgctattaattatataaatcaatggaaagatgtaaatagtgattataatgttaatgttttttatgatagtaatgcatttttgataaacacattgaaaaaaactgtagtagaatcagcaataaatgatacacttgaatcatttagagaaaacttaaatgaccctagatttgactataataaattcttcagaaaacgtatggaaataatttatgataaacagaaaaatttcataaactactataaagctcaaagagaagaaaatcctgaacttataattgatgatattgtaaagacatatctttcaaatgagtattcaaaggagatagatgaacttaatacctatattgaagaatccttaaataaaattacacagaatagtggaaatgatgttagaaactttgaagaatttaaaaatggagagtcattcaacttatatgaacaagagttggtagaaaggtggaatttagctgctgcttctgacatattaagaatatctgcattaaaagaaattggtggtatgtatttagcagttgcaatgttaccaggaatacaaccagacttatttgagtctatagagaaacctagttcagtaacagtggatttttgggaaatgacaaagttagaagctataatgaaatacaaagaatatataccagaatatacctcagaacattttgacatgttagacgaagaagttcaaagtagttttgaatctgttctagcttctaagtcagataaatcagaaatattctcatcacttggtgatatggaggcatcaccactagaagttaaaattgcatttaatagtaagggtattataaatcaagggctaatttctgtgaaagactcatattgtagcaatttaatagtaaaacaaatcgagaatagatataaaatattgaataatagtttaaatccagctattagcgaggataatgattttaatactacaacgaatacctttattgatagtataatggctgaagctaatgcagataatggtagatttatgatggaactaggaaagtatttaagagttggtttcttcccagatgttaaaactactattaacttaagtggccctgaagcttatgcggcagcttatcaagatttattaatgtttaaagaaggcagtatgaatatccatttgatagaagctgatttaagaaactttgaaatctctaaaactaatatttctcaatcaactgaacaagaaatggcttctttatggtcatttgacgatgcaagagctaaagctcaatttgaagaatataaaaggaattattttgaaggttctcttggtgaagatgataatcttgatttttctcaaaatatagtagttgacaaggagtatcttttagaaaaaatatcttcattagcaagaagttcagagagaggatatatacactatattgttcagttacaaggagataaaattagttatgaagcagcatgtaacttatttgcaaagactccttatgatagtgtactgtttcagaaaaatatagaagattcagaaattgcatattattataatcctggagatggtgaaatacaagaaatagacaagtataaaattccaagtataatttctgatagacctaagattaaattaacatttattggtcatggtaaagatgaatttaatactgatatatttgcaggttttgatgtagattcattatccacagaaatagaagcagcaatagatttagctaaagaggatatttctcctaagtcaatagaaataaatttattaggatgtaatatgtttagctactctatcaacgtagaggagacttatcctggaaaattattacttaaagttaaagataaaatatcagaattaatgccatctataagtcaagactctattatagtaagtgcaaatcaatatgaagttagaataaatagtgaaggaagaagagaattattggatcattctggtgaatggataaataaagaagaaagtattataaaggatatttcatcaaaagaatatatatcatttaatcctaaagaaaataaaattacagtaaaatctaaaaatttacctgagctatctacattattacaagaaattagaaataattctaattcaagtgatattgaactagaagaaaaagtaatgttaacagaatgtgagataaatgttatttcaaatatagatacgcaaattgttgaggaaaggattgaagaagctaagaatttaacttctgactctattaattatataaaagatgaatttaaactaatagaatctatttctgatgcactatgtgacttaaaacaacagaatgaattagaagattctcattttatatcttttgaggacatatcagagactgatgagggatttagtataagatttattaataaagaaactggagaatctatatttgtagaaactgaaaaaacaatattctctgaatatgctaatcatataactgaagagatttctaagataaaaggtactatatttgatactgtaaatggtaagttagtaaaaaaagtaaatttagatactacacacgaagtaaatactttaaatgctgcattttttatacaatcattaatagaatataatagttctaaagaatctcttagtaatttaagtgtagcaatgaaagtccaagtttacgctcaattatttagtactggtttaaatactattacagatgcagccaaagttgttgaattagtatcaactgcattagatgaaactatagacttacttcctacattatctgaaggattacctataattgcaactattatagatggtgtaagtttaggtgcagcaatcaaagagctaagtgaaacgagtgacccattattaagacaagaaatagaagctaagataggtataatggcagtaaatttaacaacagctacaactgcaatcattacttcatctttggggatagctagtggatttagtatacttttagttcctttagcaggaatttcagcaggtataccaagcttagtaaacaatgaacttgtacttcgagataaggcaacaaaggttgtagattattttaaacatgtttcattagttgaaactgaaggagtatttactttattagatgataaaataatgatgccacaagatgatttagtgatatcagaaatagattttaataataattcaatagttttaggtaaatgtgaaatctggagaatggaaggtggttcaggtcatactgtaactgatgatatagatcacttcttttcagcaccatcaataacatatagagagccacacttatctatatatgacgtattggaagtacaaaaagaagaacttgatttgtcaaaagatttaatggtattacctaatgctccaaatagagtatttgcttgggaaacaggatggacaccaggtttaagaagcttagaaaatgatggcacaaaactgttagaccgtataagagataactatgaaggtgagttttattggagatattttgcttttatagctgatgctttaataacaacattaaaaccaagatatgaagatactaatataagaataaatttagatagtaatactagaagttttatagttccaataataactacagaatatataagagaaaaattatcatattctttctatggttcaggaggaacttatgcattgtctctttctcaatataatatgggtataaatatagaattaagtgaaagtgatgtttggattatagatgttgataatgttgtgagagatgtaactatagaatctgataaaattaaaaaaggtgatttaatagaaggtattttatctacactaagtattgaagagaataaaattatcttaaatagccatgagattaatttttctggtgaggtaaatggaagtaatggatttgtttctttaacattttcaattttagaaggaataaatgcaattatagaagttgatttattatctaaatcatataaattacttatttctggcgaattaaaaatattgatgttaaattcaaatcatattcaacagaaaatagattatataggattcaatagcgaattacagaaaaatataccatatagctttgtagatagtgaaggaaaagagaatggttttattaatggttcaacaaaagaaggtttatttgtatctgaattacctgatgtagttcttataagtaaggtttatatggatgatagtaagccttcatttggatattatagtaataatttgaaagatgtcaaagttataactaaagataatgttaatatattaacaggttattatcttaaggatgatataaaaatctctctttctttgactctacaagatgaaaaaactataaagttaaatagtgtgcatttagatgaaagtggagtagctgagattttgaagttcatgaatagaaaaggtaatacaaatacttcagattctttaatgagctttttagaaagtatgaatataaaaagtattttcgttaatttcttacaatctaatattaagtttatattagatgctaattttataataagtggtactacttctattggccaatttgagtttatttgtgatgaaaatgataatatacaaccatatttcattaagtttaatacactagaaactaattatactttatatgtaggaaatagacaaaatatgatagtggaaccaaattatgatttagatgattctggagatatatcttcaactgttatcaatttctctcaaaagtatctttatggaatagacagttgtgttaataaagttgtaatttcaccaaatatttatacagatgaaataaatataacgcctgtatatgaaacaaataatacttatccagaagttattgtattagatgcaaattatataaatgaaaaaataaatgttaatatcaatgatctatctatacgatatgtatggagtaatgatggtaatgattttattcttatgtcaactagtgaagaaaataaggtgtcacaagttaaaataagattcgttaatgtttttaaagataagactttggcaaataagctatcttttaactttagtgataaacaagatgtacctgtaagtgaaataatcttatcatttacaccttcatattatgaggatggattgattggctatgatttgggtctagtttctttatataatgagaaattttatattaataactttggaatgatggtatctggattaatatatattaatgattcattatattattttaaaccaccagtaaataatttgataactggatttgtgactgtaggcgatgataaatactactttaatccaattaatggtggagctgcttcaattggagagacaataattgatgacaaaaattattatttcaaccaaagtggagtgttacaaacaggtgtatttagtacagaagatggatttaaatattttgccccagctaatacacttgatgaaaacctagaaggagaagcaattgattttactggaaaattaattattgacgaaaatatttattattttgatgataattatagaggagctgtagaatggaaagaattagatggtgaaatgcactattttagcccagaaacaggtaaagcttttaaaggtctaaatcaaataggtgattataaatactatttcaattctgatggagttatgcaaaaaggatttgttagtataaatgataataaacactattttgatgattctggtgttatgaaagtaggttacactgaaatagatggcaagcatttctactttgctgaaaacggagaaatgcaaataggagtatttaatacagaagatggatttaaatattttgctcatcataatgaagatttaggaaatgaagaaggtgaagaaatctcatattctggtatattaaatttcaataataaaatttactattttgatgattcatttactgctgtagttggatggaaagatttagaggatggttcaaagtattattttgatgaagatacagcagaagcatatataggtttgtcattaataaatgatggtcaatattattttaatgatgatggaattatgcaagttggatttgtcactataaatgataaagtcttctacttctctgactctggaattatagaatctggagtacaaaacatagatgacaattatttctatatagatgataatggtatagttcaaattggtgtatttgatacttcagatggatataaatattttgcacctgctaatactgtaaatgataatatttacggacaagcagttgaatatagtggtttagttagagttggtgaagatgtatattattttggagaaacatatacaattgagactggatggatatatgatatggaaaatgaaagtgataaatattatttcaatccagaaactaaaaaagcatgcaaaggtattaatttaattgatgatataaaatattattttgatgagaagggcataatgagaacgggtcttatatcatttgaaaataataattattactttaatgagaatggtgaaatgcaatttggttatataaatatagaagataagatgttctattttggtgaagatggtgtcatgcagattggagtatttaatacaccagatggatttaaatactttgcacatcaaaatactttggatgagaattttgagggagaatcaataaactatactggttggttagatttagatgaaaagagatattattttacagatgaatatattgcagcaactggttcagttattattgatggtgaggagtattattttgatcctgatacagctcaattagtgattagtgaatag

SEQ ID NO: 14 - DNA, 7101 bp, synthetic construct
  misc_feature 1..7101: note = Synthetic nucleotide sequence: TcdB (D286A D288A C698A mutations)
  source 1..7101: mol_type = other DNA
atgagtttagttaatagaaaacagttagaaaaaatggcaaatgtaagatttcgtactcaagaagatgaatatgttgcaatattggatgctttagaagaatatcataatatgtcagagaatactgtagtcgaaaaatatttaaaattaaaagatataaatagtttaacagatatttatatagatacatataaaaaatctggtagaaataaagccttaaaaaaatttaaggaatatctagttacagaagtattagagctaaagaataataatttaactccagttgagaaaaatttacattttgtttggattggaggtcaaataaatgacactgctattaattatataaatcaatggaaagatgtaaatagtgattataatgttaatgttttttatgatagtaatgcatttttgataaacacattgaaaaaaactgtagtagaatcagcaataaatgatacacttgaatcatttagagaaaacttaaatgaccctagatttgactataataaattcttcagaaaacgtatggaaataatttatgataaacagaaaaatttcataaactactataaagctcaaagagaagaaaatcctgaacttataattgatgatattgtaaagacatatctttcaaatgagtattcaaaggagatagatgaacttaatacctatattgaagaatccttaaataaaattacacagaatagtggaaatgatgttagaaactttgaagaatttaaaaatggagagtcattcaacttatatgaacaagagttggtagaaaggtggaatttagctgctgcttctgacatattaagaatatctgcattaaaagaaattggtggtatgtatttagcagttgcaatgttaccaggaatacaaccagacttatttgagtctatagagaaacctagttcagtaacagtggatttttgggaaatgacaaagttagaagctataatgaaatacaaagaatatataccagaatatacctcagaacattttgacatgttagacgaagaagttcaaagtagttttgaatctgttctagcttctaagtcagataaatcagaaatattctcatcacttggtgatatggaggcatcaccactagaagttaaaattgcatttaatagtaagggtattataaatcaagggctaatttctgtgaaagactcatattgtagcaatttaatagtaaaacaaatcgagaatagatataaaatattgaataatagtttaaatccagctattagcgaggataatgattttaatactacaacgaatacctttattgatagtataatggctgaagctaatgcagataatggtagatttatgatggaactaggaaagtatttaagagttggtttcttcccagatgttaaaactactattaacttaagtggccctgaagcttatgcggcagcttatcaagatttattaatgtttaaagaaggcagtatgaatatccatttgatagaagctgatttaagaaactttgaaatctctaaaactaatatttctcaatcaactgaacaagaaatggcttctttatggtcatttgacgatgcaagagctaaagctcaatttgaagaatataaaaggaattattttgaaggttctcttggtgaagatgataatcttgatttttctcaaaatatagtagttgacaaggagtatcttttagaaaaaatatcttcattagcaagaagttcagagagaggatatatacactatattgttcagttacaaggagataaaattagttatgaagcagcatgtaacttatttgcaaagactccttatgatagtgtactgtttcagaaaaatatagaagattcagaaattgcatattattataatcctggagatggtgaaatacaagaaatagacaagtataaaattccaagtataatttctgatagacctaagattaaattaacatttattggtcatggtaaagatgaatttaatactgatatatttgcaggttttgatgtagattcattatccacagaaatagaagcagcaatagatttagctaaagaggatatttctcctaagtcaatagaaataaatttattaggagctaatatgtttagctactctatcaacgtagaggagacttatcctggaaaattattacttaaagttaaagataaaatatcagaattaatgccatctataagtcaagactctattatagtaagtgcaaatcaatatgaagttagaataaatagtgaaggaagaagagaattattggatcattctggtgaatggataaataaagaagaaagtattataaaggatatttcatcaaaagaatatatatcatttaatcctaaagaaaataaaattacagtaaaatctaaaaatttacctgagctatctacattattacaagaaattagaaataattctaattcaagtgatattgaactagaagaaaaagtaatgttaacagaatgtgagataaatgttatttcaaatatagatacgcaaattgttgaggaaaggattgaagaagctaagaatttaacttctgactctattaattatataaaagatgaatttaaactaatagaatctatttctgatgcactatgtgacttaaaacaacagaatgaattagaagattctcattttatatcttttgaggacatatcagagactgatgagggatttagtataagatttattaataaagaaactggagaatctatatttgtagaaactgaaaaaacaatattctctgaatatgctaatcatataactgaagagatttctaagataaaaggtactatatttgatactgtaaatggtaagttagtaaaaaaagtaaatttagatactacacacgaagtaaatactttaaatgctgcattttttatacaatcattaatagaatataatagttctaaagaatctcttagtaatttaagtgtagcaatgaaagtccaagtttacgctcaattatttagtactggtttaaatactattacagatgcagccaaagttgttgaattagtatcaactgcattagatgaaactatagacttacttcctacattatctgaaggattacctataattgcaactattatagatggtgtaagtttaggtgcagcaatcaaagagctaagtgaaacgagtgacccattattaagacaagaaatagaagctaagataggtataatggcagtaaatttaacaacagctacaactgcaatcattacttcatctttggggatagctagtggatttagtatacttttagttcctttagcaggaatttcagcaggtataccaagcttagtaaacaatgaacttgtacttcgagataaggcaacaaaggttgtagattattttaaacatgtttcattagttgaaactgaaggagtatttactttattagatgataaaataatgatgccacaagatgatttagtgatatcagaaatagattttaataataattcaatagttttaggtaaatgtgaaatctggagaatggaaggtggttcaggtcatactgtaactgatgatatagatcacttcttttcagcaccatcaataacatatagagagccacacttatctatatatgacgtattggaagtacaaaaagaagaacttgatttgtcaaaagatttaatggtattacctaatgctccaaatagagtatttgcttgggaaacaggatggacaccaggtttaagaagcttagaaaatgatggcacaaaactgttagaccgtataagagataactatgaaggtgagttttattggagatattttgcttttatagctgatgctttaataacaacattaaaaccaagatatgaagatactaatataagaataaatttagatagtaatactagaagttttatagttccaataataactacagaatatataagagaaaaattatcatattctttctatggttcaggaggaacttatgcattgtctctttctcaatataatatgggtataaatatagaattaagtgaaagtgatgtttggattatagatgttgataatgttgtgagagatgtaactatagaatctgataaaattaaaaaaggtgatttaatagaaggtattttatctacactaagtattgaagagaataaaattatcttaaatagccatgagattaatttttctggtgaggtaaatggaagtaatggatttgtttctttaacattttcaattttagaaggaataaatgcaattatagaagttgatttattatctaaatcatataaattacttatttctggcgaattaaaaatattgatgttaaattcaaatcatattcaacagaaaatagattatataggattcaatagcgaattacagaaaaatataccatatagctttgtagatagtgaaggaaaagagaatggttttattaatggttcaacaaaagaaggtttatttgtatctgaattacctgatgtagttcttataagtaaggtttatatggatgatagtaagccttcatttggatattatagtaataatttgaaagatgtcaaagttataactaaagataatgttaatatattaacaggttattatcttaaggatgatataaaaatctctctttctttgactctacaagatgaaaaaactataaagttaaatagtgtgcatttagatgaaagtggagtagctgagattttgaagttcatgaatagaaaaggtaatacaaatacttcagattctttaatgagctttttagaaagtatgaatataaaaagtattttcgttaatttcttacaatctaatattaagtttatattagatgctaattttataataagtggtactacttctattggccaatttgagtttatttgtgatgaaaatgataatatacaaccatatttcattaagtttaatacactagaaactaattatactttatatgtaggaaatagacaaaatatgatagtggaaccaaattatgatttagatgattctggagatatatcttcaactgttatcaatttctctcaaaagtatctttatggaatagacagttgtgttaataaagttgtaatttcaccaaatatttatacagatgaaataaatataacgcctgtatatgaaacaaataatacttatccagaagttattgtattagatgcaaattatataaatgaaaaaataaatgttaatatcaatgatctatctatacgatatgtatggagtaatgatggtaatgattttattcttatgtcaactagtgaagaaaataaggtgtcacaagttaaaataagattcgttaatgtttttaaagataagactttggcaaataagctatcttttaactttagtgataaacaagatgtacctgtaagtgaaataatcttatcatttacaccttcatattatgaggatggattgattggctatgatttgggtctagtttctttatataatgagaaattttatattaataactttggaatgatggtatctggattaatatatattaatgattcattatattattttaaaccaccagtaaataatttgataactggatttgtgactgtaggcgatgataaatactactttaatccaattaatggtggagctgcttcaattggagagacaataattgatgacaaaaattattatttcaaccaaagtggagtgttacaaacaggtgtatttagtacagaagatggatttaaatattttgccccagctaatacacttgatgaaaacctagaaggagaagcaattgattttactggaaaattaattattgacgaaaatatttattattttgatgataattatagaggagctgtagaatggaaagaattagatggtgaaatgcactattttagcccagaaacaggtaaagcttttaaaggtctaaatcaaataggtgattataaatactatttcaattctgatggagttatgcaaaaaggatttgttagtataaatgataataaacactattttgatgattctggtgttatgaaagtaggttacactgaaatagatggcaagcatttctactttgctgaaaacggagaaatgcaaataggagtatttaatacagaagatggatttaaatattttgctcatcataatgaagatttaggaaatgaagaaggtgaagaaatctcatattctggtatattaaatttcaataataaaatttactattttgatgattcatttactgctgtagttggatggaaagatttagaggatggttcaaagtattattttgatgaagatacagcagaagcatatataggtttgtcattaataaatgatggtcaatattattttaatgatgatggaattatgcaagttggatttgtcactataaatgataaagtcttctacttctctgactctggaattatagaatctggagtacaaaacatagatgacaattatttctatatagatgataatggtatagttcaaattggtgtatttgatacttcagatggatataaatattttgcacctgctaatactgtaaatgataatatttacggacaagcagttgaatatagtggtttagttagagttggtgaagatgtatattattttggagaaacatatacaattgagactggatggatatatgatatggaaaatgaaagtgataaatattatttcaatccagaaactaaaaaagcatgcaaaggtattaatttaattgatgatataaaatattattttgatgagaagggcataatgagaacgggtcttatatcatttgaaaataataattattactttaatgagaatggtgaaatgcaatttggttatataaatatagaagataagatgttctattttggtgaagatggtgtcatgcagattggagtatttaatacaccagatggatttaaatactttgcacatcaaaatactttggatgagaattttgagggagaatcaataaactatactggttggttagatttagatgaaaagagatattattttacagatgaatatattgcagcaactggttcagttattattgatggtgaggagtattattttgatcctgatacagctcaattagtgattagtgaatag

SEQ ID NO: 15 - protein, 2710 aa, Clostridium difficile
MSLISKEELIKLAYSIRPRENEYKTILTNLDEYNKLTTNNNENKYLQLKKLNESIDVFMNKYKNSSRNRALSNLKKDILKEVILIKNSNTSPVEKNLHFVWIGGEVSDIALEYIKQWADINAEYNIKLWYDSEAFLVNTLKKAIVESSTTEALQLLEEEIQNPQFDNMKFYKKRMEFIYDRQKRFINYYKSQINKPTVPTIDDIIKSHLVSEYNRDETLLESYRTNSLRKINSNHGIDIRANSLFTEQELLNIYSQELLNRGNLAAASDIVRLLALKNFGGVYLDVDMLPGIHSDLFKTIPRPSSIGLDRWEMIKLEAIMKYKKYINNYTSENFDKLDQQLKDNFKLIIESKSEKSEIFSKLENLNVSDLEIKIAFALGSVINQALISKQGSYLTNLVIEQVKNRYQFLNQHLNPAIESDNNFTDTTKIFHDSLFNSATAENSMFLTKIAPYLQVGFMPEARSTISLSGPGAYASAYYDFINLQENTIEKTLKASDLIEFKFPENNLSQLTEQEINSLWSFDQASAKYQFEKYVRDYTGGSLSEDNGVDFNKNTALDKNYLLNNKIPSNNVEEAGSKNYVHYIIQLQGDDISYEATCNLFSKNPKNSIIIQRNMNESAKSYFLSDDGESILELNKYRIPERLKNKEKVKVTFIGHGKDEFNTSEFARLSVDSLSNEISSFLDTIKLDISPKNVEVNLLGCNMFSYDFNVEETYPGKLLLSIMDKITSTLPDVNKDSITIGANQYEVRINSEGRKELLAHSGKWINKEEAIMSDLSSKEYIFFDSIDNKLKAKSKNIPGLASISEDIKTLLLDASVSPDTKFILNNLKLNIESSIGDYIYYEKLEPVKNIIHNSIDDLIDEFNLLENVSDELYELKKLNNLDEKYLISFEDISKNNSTYSVRFINKSNGESVYVETEKEIFSKYSEHITKEISTIKNSIITDVNGNLLDNIQLDHTSQVNTLNAAFFIQSLIDYSSNKDVLNDLSTSVKVQLYAQLFSTGLNTIYDSIQLVNLISNAVNDTINVLPTITEGIPIVSTILDGINLGAAIKELLDEHDPLLKKELEAKVGVLAINMSLSIAATVASIVGIGAEVTIFLLPIAGISAGIPSLVNNELILHDKATSVVNYFNHLSESKEYGPLKTEDDKILVPIDDLVISEIDFNNNSIKLGTCNILAMEGGSGHTVTGNIDHFFSSPYISSHIPSLSVYSAIGIKTENLDFSKKIMMLPNAPSRVFWWETGAVPGLRSLENNGTKLLDSIRDLYPGKFYWRFYAFFDYAITTLKPVYEDTNTKIKLDKDTRNFIMPTITTDEIRNKLSYSFDGAGGTYSLLLSSYPISMNINLSKDDLWIFNIDNEVREISIENGTIKKGNLIEDVLSKIDINKNKLIIGNQTIDFSGDIDNKDRYIFLTCELDDKISLIIEINLVAKSYSLLLSGDKNYLISNLSNTIEKINTLGLDSKNIAYNYTDESNNKYFGAISKTSQKSIIHYKKDSKNILEFYNGSTLEFNSKDFIAEDINVFMKDDINTITGKYYVDNNTDKSIDFSISLVSKNQVKVNGLYLNESVYSSYLDFVKNSDGHHNTSNFMNLFLNNISFWKLFGFENINFVIDKYFTLVGKTNLGYVEFICDNNKNIDIYFGEWKTSSSKSTIFSGNGRNVVVEPIYNPDTGEDISTSLDFSYEPLYGIDRYINKVLIAPDLYTSLININTNYYSNEYYPEIIVLNPNTFHKKVNINLDSSSFEYKWSTEGSDFILVRYLEESNKKILQKIRIKGILSNTQSFNKMSIDFKDIKKLSLGYIMSNFKSFNSENELDRDHLGFKIIDNKTYYYDEDSKLVKGLININNSLFYFDPIESNLVTGWQTINGKKYYFDINTGAASTSYKIINGKHFYFNNNGVMQLGVFKGPDGFEYFAPANTQNNNIEGQAIVYQSKFLTLNGKKYYFDNDSKAVTGWRIINNEKYYFNPNNAIAAVGLQVIDNNKYYFNPDTAIISKGWQTVNGSRYYFDTDTAIAFNGYKTIDGKHFYFDSDCVVKIGVFSGSNGFEYFAPANTYNNNIEGQAIVYQSKFLTLNGKKYYFDNNSKAVTGWQTIDSKKYYFNTNTAEAATGWQTIDGKKYYFNTNTAEAATGWQTIDGKKYYFNTNTSIASTGYTIINGKYFYFNTDGIMQIGVFKVPNGFEYFAPANTHNNNIEGQAILYQNKFLTLNGKKYYFGSDSKAITGWQTIDGKKYYFNPNNAIAATHLCTINNDKYYFSYDGILQNGYITIERNNFYFDANNESKMVTGVFKGPNGFEYFAPANTHNNNIEGQAIVYQNKFLTLNGKKYYFDNDSKAVTGWQTIDSKKYYFNLNTAVAVTGWQTIDGEKYYFNLNTAEAATGWQTIDGKRYYFNTNTYIASTGYTIINGKHFYFNTDGIMQIGVFKGPDGFEYFAPANTHNNNIEGQAILYQNKFLTLNGKKYYFGSDSKAVTGLRTIDGKKYYFNTNTAVAVTGWQTINGKKYYFNTNTYIASTGYTIISGKHFYFNTDGIMQIGVFKGPDGFEYFAPANTDANNIEGQAIRYQNRFLYLHDNIYYFGNDSKAATGWATIDGNRYYFEPNTAMGANGYKTIDNKNFYFRNGLPQIGVFKGPNGFEYFAPANTDANNIDGQAIRYQNRFLHLLGKIYYFGNNSKAVTGWQTINSKVYYFMPDTAMAAAGGLFEIDGVIYFFGVDGVKAPGIYG

SEQ ID NO: 16 - DNA, 8133 bp, Clostridium difficile
  source 1..8133: mol_type = genomic DNA
atgtctttaatatctaaagaagagttaataaaactcgcatatagcattagaccaagagaaaatgagtataaaactatactaactaatttagacgaatataataagttaactacaaacaataatgaaaataaatatttacaattaaaaaaactaaatgaatcaattgatgtttttatgaataaatataaaaattcaagcagaaatagagcactctctaatctaaaaaaagatatattaaaagaagtaattcttattaaaaattccaatacaagtcctgtagaaaaaaatttacattttgtatggataggtggagaagtcagtgatattgctcttgaatacataaaacaatgggctgatattaatgcagaatataatattaaactgtggtatgatagtgaagcattcttagtcaatacactaaaaaaggctatagttgaatcttctaccactgaagcattacagctactagaggaagagattcaaaatcctcaatttgataatatgaaattttacaaaaaaaggatggaatttatatatgatagacaaaaaaggtttataaattattataaatctcaaatcaataaacctacagtacctacaatagatgatattataaagtctcatctagtatctgaatataatagagatgaaactttattagaatcatatagaacaaattctttgagaaaaataaatagtaatcatgggatagatatcagggctaatagtttgtttacagaacaagagttattaaatatttatagtcaggagttgttaaatcgtgggaatttagctgcagcatctgacatagtaagattattagccctaaaaaattttggcggagtatatttagatgttgatatgcttccaggtattcactctgatttatttaaaacaatacctagacctagctctattggactagaccgttgggaaatgataaaattagaggctattatgaagtataaaaaatatataaataattatacatcagaaaactttgataaacttgatcaacaattaaaagataattttaaactcattatagaaagtaaaagtgaaaaatctgagatattttctaaattagaaaatttaaatgtatctgatcttgaaattaaaatagctttcgctttaggcagtgttataaatcaagccttgatatcaaaacaaggttcatatcttactaacctagtaatagaacaagtaaaaaatagatatcaatttttaaaccaacaccttaacccagccatagagtctgacaataacttcacagatactactaagatttttcatgattcactatttaattcagctaccgcagaaaactctatgtttttaacaaaaatagcaccatacttacaagtaggttttatgccagaagctcgctccacaataagtttaagtggtccaggagcttatgcatcagcttactatgatttcataaatttacaagaaaatactatagaaaaaactttaaaagcatcagatttaatagaatttaaattcccagaaaataatctatctcaattgacagaacaagaaataaatagtctatggagctttgatcaagcaagtgcaaaatatcaatttgagaaatatgtaagagattatactggtggatctctttctgaagacaatggggtagactttaataaaaatactgccctcgacaaaaactatttattaaataataaaattccatcaaacaatgtagaagaagctggaagtaaaaattatgttcattatatcatacagttacaaggagatgatataagttatgaagcaacatgcaatttattttctaaaaatcctaaaaatagtattattatacaacgaaatatgaatgaaagtgcaaaaagttactttttaagtgatgatggagaatctattttagaattaaataaatataggatacctgaaagattaaaaaataaggaaaaagtaaaagtaacctttattggacatggtaaagatgaattcaacacaagcgaatttgctagattaagtgtagattcactttccaatgagataagttcatttttagataccataaaattagatatatcacctaaaaatgtagaagtaaacttgcttggatgtaatatgtttagttatgattttaatgttgaagaaacttatcctggtaagttactattaagtattatggacaaaattacttccactttacctgatgtaaataaagattctattactataggagcaaatcaatatgaagtaagaattaatagtgagggaagaaaagaacttctagctcactcaggtaaatggataaataaagaggaagctattatgagcgatttatctagtaaagaatacattttttttgattccatagataataagctaaaagcaaagtccaagaatattccaggtttagcgtcaatatcagaagatataaaaacattattacttgatgcaagtgttagtcctgatacaaaatttattttaaataatcttaagcttaatattgaatcttctattggtgattacatttattatgaaaaattagaacctgttaaaaatataatccacaattctatagatgatttaatagatgagttcaatctacttgaaaatgtatctgatgaattatatgaattaaaaaaattaaataatctagatgagaagtatttaatatcttttgaagatatctcaaaaaataattcaacttattctgtaagatttattaacaaaagtaatggtgaatcagtttatgtagagacagaaaaagaaattttttcaaaatatagcgaacatattacaaaagaaataagtactataaagaatagtataattacagatgttaatggtaatttattggataatatacagttagatcatacttctcaagttaatacattaaacgcagcattctttattcaatcattaatagattatagtagcaataaagatgtactgaatgatttaagtacctcagttaaggttcaactttatgctcaactatttagtacaggtttaaatactatatatgactctatccaattagtaaatttaatatcaaatgcagtaaatgatactataaatgtactacctacaataacagaggggatacctattgtatctactatattagacggaataaacttaggtgcagcaattaaggaattactagacgaacatgacccattactaaaaaaagaactagaagctaaggtgggtgttttagcaataaatatgtcattatctatagctgcaacggtagcttcaattgttggaataggtgctgaagttactattttcttattacctatagctggtatatctgcgggaataccttcattagttaataatgaattaatattgcatgataaggcaacttcagtggtaaactattttaatcatttgtctgaatctaaagaatatggccctcttaaaacagaagatgataaaattttagttcctattgatgatttagtaatatcagaaatagattttaataataattcgataaaactaggaacatgtaatatattagcaatggaggggggatcaggacacacagtgactggtaatatagatcactttttctcatctccatatataagctctcatattccttcattatcagtttattctgcaataggtataaaaacagaaaatctagatttttcaaaaaaaataatgatgttaccaaatgctccttcaagagtgttttggtgggaaactggagcagttccaggtttaagatcattggaaaataatgggactaaattgcttgattcaataagagatttatacccaggcaaattttactggagattctatgcctttttcgattatgcaataactacattaaaaccagtgtatgaagacactaatactaaaattaaactagataaagatactagaaactttataatgccaactataactactgacgaaattagaaacaaattatcttattcatttgatggagcaggaggaacttactctttattattatcttcatatccaatatcaatgaatataaatttatctaaagatgatttatggatatttaatattgataatgaagtaagagaaatatctatagaaaatggtactattaaaaaaggaaatttaatagaagatgttttaagtaaaattgatataaataaaaataaacttattataggcaatcaaacaatagatttttcaggtgatatagataacaaagatagatatatattcttgacttgtgagttagatgataaaattagtttaataatagaaataaatcttgttgcaaaatcttatagtttgttattgtctggggataaaaattatttgatatccaatttatctaatactattgagaaaatcaatactttaggcctagatagtaaaaatatagcttacaattacactgatgaatctaataataaatattttggagctatatctaaaacaagtcaaaaaagcataatacattataaaaaagacagtaaaaatatattagaattttataatggcagtacattagaatttaacagtaaagactttattgctgaagatataaatgtatttatgaaagatgatattaatactataacaggaaaatactatgttgataataatactgataaaagtatagatttctctatttctttagttagtaaaaatcaagtaaaagtaaatggattatatttaaatgaatccgtatactcatcttaccttgattttgtgaaaaattcagatggacaccataatacttctaattttatgaatttatttttgaacaatataagtttctggaaattgtttgggtttgaaaatataaattttgtaatcgataaatactttacccttgttggtaaaactaatcttggatatgtagaatttatttgtgacaataataaaaatatagatatatattttggtgaatggaaaacatcgtcatctaaaagcactatatttagcggaaatggtagaaatgttgtagtagagcctatatataatcctgatacgggtgaagatatatctacttcactagatttttcctatgaacctctctatggaatagatagatatatcaataaagtattgatagcacctgatttatatacaagtttaataaatattaataccaattattattcaaatgagtactaccctgagattatagttcttaacccaaatacattccacaaaaaagtaaatataaatttagatagttcttcttttgagtataaatggtctacagaaggaagtgactttattttagttagatacttagaagaaagtaataaaaaaatattacaaaaaataagaatcaaaggtatcttatctaatactcaatcatttaataaaatgagtatagattttaaagatattaaaaaactatcattaggatatataatgagtaattttaaatcatttaattctgaaaatgaattagatagagatcatttaggatttaaaataatagataataaaacttattactatgatgaagatagtaaattagttaaaggattaatcaatataaataattcattattctattttgatcctatagaatctaacttagtaactggatggcaaactatcaatggtaaaaaatattattttgatataaatactggagcagcttcaactagttataaaattattaatggtaaacacttttattttaataataatggtgtgatgcagttaggagtatttaaaggacctgatggatttgagtattttgcacctgccaatactcagaataataacatagaaggtcaggctatagtttatcaaagtaaattcttaactttgaatggcaaaaaatattattttgataatgactcaaaagcagtcactggatggaggattattaacaatgagaaatattactttaatcctaataatgctattgctgcagtcggattgcaagtaattgacaataataagtattatttcaatcctgacactgctatcatctcaaaaggttggcagactgttaatggtagtagatactactttgatactgataccgctattgcctttaatggttataaaactattgatggtaaacacttttattttgatagtgattgtgtagtgaaaataggtgtgtttagtggctctaatggatttgaatatttcgcacctgctaatacttataataataacatagaaggtcaggctatagtttatcaaagtaaattcttaactttgaatggtaaaaaatattactttgataataactcaaaagcagttaccggatggcaaactattgatagtaaaaaatattactttaatactaacactgctgaagcagctactggatggcaaactattgatggtaaaaagtattactttaatactaacactgctgaagcagctactggatggcaaactattgatggtaaaaaatattactttaatactaacacttctatagcttcaactggttatacaattattaatggtaaatatttttattttaatactgatggtattatgcagataggagtgtttaaagtacctaatggatttgaatactttgcacctgctaatactcataataataacatagaaggtcaagctatactttaccaaaataaattcttaactttgaatggtaaaaaatattactttggtagtgactcaaaagcaattactggatggcaaaccattgatggtaaaaaatattactttaatcctaataatgctattgctgcgactcatctatgcactataaataacgacaagtattactttagttatgatggaattcttcaaaatggatatattactattgaaagaaataatttctattttgatgctaataatgaatctaaaatggtaacaggagtatttaaaggacctaatggatttgagtattttgcacctgctaatactcataataataacatagaaggtcaggctatagtttaccagaataaattcttaactttgaatggcaaaaaatattattttgataatgactcaaaagcagttactggatggcaaactattgatagtaaaaaatattactttaatcttaacactgctgttgcagttactggatggcaaactattgatggtgaaaaatattactttaatcttaacactgctgaagcagctactggatggcaaactattgatggtaaaagatactactttaatactaacacttatatagcttcaactggttatacgattattaatggtaaacatttttattttaatactgatggtattatgcagataggagtgtttaaaggacctgatggatttgaatactttgcacctgctaatactcataataataacatagaaggtcaagctatactttaccaaaataaattcttaactttgaatggtaaaaaatattactttggtagtgactcaaaagcagttaccggattgcgaactattgatggtaaaaaatattactttaatactaacactgctgttgcagttactggatggcaaactattaatggtaaaaaatactactttaatactaacacttatatagcttcaactggttatacaattattagtggtaaacatttttattttaatactgatggtattatgcagataggagtgtttaaaggacctgatggatttgaatactttgcacctgctaatacggatgctaacaacatagaaggtcaagctatacgttatcaaaatagattcctatatttacatgacaatatatattactttggcaatgattcaaaagcggctactggttgggcaactattgatggtaatagatattacttcgagcctaatacagctatgggtgcgaatggttataaaactattgataataaaaatttttactttagaaatggtttacctcagataggagtgtttaaaggacctaatggatttgaatactttgcacctgctaatacggatgctaacaatatagatggtcaagctatacgttatcaaaatagattcctacatttacttggaaaaatatattactttggtaataactcaaaagcagttactggatggcaaactattaatagtaaagtatattactttatgcctgatactgctatggctgcagctggtggacttttcgagattgatggtgttatatatttctttggtgttgatggagtaaaagcccctgggatatatggctaa

SEQ ID NO: 17 - protein, 2710 aa, Clostridium difficile; identical to SEQ ID NO: 15

SEQ ID NO: 18 - DNA, 8133 bp, Clostridium difficile; identical to SEQ ID NO: 16
  source 1..8133: mol_type = genomic DNA

SEQ ID NO: 19 - protein, 2710 aa, Clostridium difficile
MSLISKEELIKLAYSIRPRENEYKTILTNLDEYNKLTTNNNENKYLQLKKLNESIDVFMNKYKTSSRNRALSNLKKDILKEVILIKNSNTSPVEKNLHFVWIGGEVSDIALEYIKQWADINAEYNIKLWYDSEAFLVNTLKKAIVESSTTEALQLLEEEIQNPQFDNMKFYKKRMEFIYDRQKRFINYYKSQINKPTVPTIDDIIKSHLVSEYNRDETVLESYRTNSLRKINSNHGIDIRANSLFTEQELLNIYSQELLNRGNLAAASDIVRLLALKNFGGVYLDVDMLPGIHSDLFKTISRPSSIGLDRWEMIKLEAIMKYKKYINNYTSENFDKLDQQLKDNFKLIIESKSEKSEIFSKLENLNVSDLEIKIAFALGSVINQALISKQGSYLTNLVIEQVKNRYQFLNQHLNPAIESDNNFTDTTKIFHDSLFNSATAENSMFLTKIAPYLQVGFMPEARSTISLSGPGAYASAYYDFINLQENTIEKTLKASDLIEFKFPENNLSQLTEQEINSLWSFDQASAKYQFEKYVRDYTGGSLSEDNGVDFNKNTALDKNYLLNNKIPSNNVEEAGSKNYVHYIIQLQGDDISYEATCNLFSKNPKNSIIIQRNMNESAKSYFLSDDGESILELNKYRIPERLKNKEKVKVTFIGHGKDEFNTSEFARLSVDSLSNEISSFLDTIKLDISPKNVEVNLLGCNMFSYDFNVEETYPGKLLLSIMDKITSTLPDVNKNSITIGANQYEVRINSEGRKELLAHSGKWINKEEAIMSDLSSKEYIFFDSIDNKLKAKSKNIPGLASISEDIKTLLLDASVSPDTKFILNNLKLNIESSIGDYIYYEKLEPVKNIIHNSIDDLIDEFNLLENVSDELYELKKLNNLDEKYLISFEDISKNNSTYSVRFINKSNGESVYVETEKEIFSKYSEHITKEISTIKNSIITDVNGNLLDNIQLDHTSQVNTLNAAFFIQSLIDYSSNKDVLNDLSTSVKVQLYAQLFSTGLNTIYDSIQLVNLISNAVNDTINVLPTITEGIPIVSTILDGINLGAAIKELLDEHDPLLKKELEAKVGVLAINMSLSIAATVASIVGIGAEVTIFLLPIAGISAGIPSLVNNELILHDKATSVVNYFNHLSESKKYGPLKTEDDKILVPIDDLVISEIDFNNNSIKLGTCNILAMEGGSGHTVTGNIDHFFSSPSISSHIPSLSIYSAIGIETENLDFSKKIMMLPNAPSRVFWWETGAVPGLRSLENDGTRLLDSIRDLYPGKFYWRFYAFFDYAITTLKPVYEDTNIKIKLDKDTRNFIMPTITTNEIRNKLSYSFDGAGGTYSLLLSSYPISTNINLSKDDLWIFNIDNEVREISIENGTIKKGKLIKDVLSKIDINKNKLIIGNQTIDFSGDIDNKDRYIFLTCELDDKISLIIEINLVAKSYSLLLSGDKNYLISNLSNTIEKINTLGLDSKNIAYNYTDESNNKYFGAISKTSQKSIIHYKKDSKNILEFYNDSTLEFNSKDFIAEDINVFMKDDINTITGKYYVDNNTDKSIDFSISLVSKNQVKVNGLYLNESVYSSYLDFVKNSDGHHNTSNFMNLFLDNISFWKLFGFENINFVIDKYFTLVGKTNLGYVEFICDNNKNIDIYFGEWKTSSSKSTIFSGNGRNVVVEPIYNPDTGEDISTSLDFSYEPLYGIDRYINKVLIAPDLYTSLININTNYYSNEYYPEIIVLNPNTFHKKVNINLDSSSFEYKWSTEGSDFILVRYLEESNKKILQKIRIKGILSNTQSFNKMSIDFKDIKKLSLGYIMSNFKSFNSENELDRDHLGFKIIDNKTYYYDEDSKLVKGLININNSLFYFDPIEFNLVTGWQTINGKKYYFDINTGAALTSYKIINGKHFYFNNDGVMQLGVFKGPDGFEYFAPANTQNNNIEGQAIVYQSKFLTLNGKKYYFDNNSKAVTGWRIINNEKYYFNPNNAIAAVGLQVIDNNKYYFNPDTAIISKGWQTVNGSRYYFDTDTAIAFNGYKTIDGKHFYFDSDCVVKIGVFSTSNGFEYFAPANTYNNNIEGQAIVYQSKFLTLNGKKYYFDNNSKAVTGLQTIDSKKYYFNTNTAEAATGWQTIDGKKYYFNTNTAEAATGWQTIDGKKYYFNTNTAIASTGYTIINGKHFYFNTDGIMQIGVFKGPNGFEYFAPANTDANNIEGQAILYQNEFLTLNGKKYYFGSDSKAVTGWRIINNKKYYFNPNNAIAAIHLCTINNDKYYFSYDGILQNGYITIERNNFYFDANNESKMVTGVFKGPNGFEYFAPANTHNNNIEGQAIVYQNKFLTLNGKKYYFDNDSKAVTGWQTIDGKKYYFNLNTAEAATGWQTIDGKKYYFNLNTAEAATGWQTIDGKKYYFNTNTFIASTGYTSINGKHFYFNTDGIMQIGVFKGPNGFEYFAPANTDANNIEGQAILYQNKFLTLNGKKYYFGSDSKAVTGLRTIDGKKYYFNTNTAVAVTGWQTINGKKYYFNTNTSIASTGYTIISGKHFYFNTDGIMQIGVFKGPDGFEYFAPANTDANNIEGQAIRYQNRFLYLHDNIYYFGNNSKAATGWVTIDGNRYYFEPNTAMGANGYKTIDNKNFYFRNGLPQIGVFKGSNGFEYFAPANTDANNIEGQAIRYQNRFLHLLGKIYYFGNNSKAVTGWQTINGKVYYFMPDTAMAAAGGLFEIDGVIYFFGVDGVKAPGIYG

SEQ ID NO: 20 - DNA, 8133 bp, Clostridium difficile
  source 1..8133: mol_type = genomic DNA
atgtctttaatatctaaagaagagttaataaaactcgcatatagcattagaccaagagaaaatgagtataaaactatactaactaatttagacgaatataataagttaactacaaacaataatgaaaataaatatttgcaattaaaaaaactaaatgaatcaattgatgtttttatgaataaatataaaacttcaagcagaaatagagcactctctaatctaaaaaaagatatattaaaagaagtaattcttattaaaaattccaatacaagccctgtagaaaaaaatttacattttgtatggataggtggagaagtcagtgatattgctcttgaatacataaaacaatgggctgatattaatgcagaatataatattaaactgtggtatgatagtgaagcattcttagtaaatacactaaaaaaggctatagttgaatcttctaccactgaagcattacagctactagaggaagagattcaaaatcctcaatttgataatatgaaattttacaaaaaaaggatggaatttatatatgatagacaaaaaaggtttataaattattataaatctcaaatcaataaacctacagtacctacaatagatgatattataaagtctcatctagtatctgaatataatagagatgaaactgtattagaatcatatagaacaaattctttgagaaaaataaatagtaatcatgggatagatatcagggctaatagtttgtttacagaacaagagttattaaatatttatagtcaggagttgttaaatcgtggaaatttagctgcagcatctgacatagtaagattattagccctaaaaaattttggcggagtatatttagatgttgatatgcttccaggtattcactctgatttatttaaaacaatatctagacctagctctattggactagaccgttgggaaatgataaaattagaggctattatgaagtataaaaaatatataaataattatacatcagaaaactttgataaacttgatcaacaattaaaagataattttaaactcattatagaaagtaaaagtgaaaaatctgagatattttctaaattagaaaatttaaatgtatctgatcttgaaattaaaatagctttcgctttaggcagtgttataaatcaagccttgatatcaaaacaaggttcatatcttactaacctagtaatagaacaagtaaaaaatagatatcaatttttaaaccaacaccttaacccagccatagagtctgataataacttcacagatactactaaaatttttcatgattcattatttaattcagctaccgcagaaaactctatgtttttaacaaaaatagcaccatacttacaagtaggttttatgccagaagctcgctccacaataagtttaagtggtccaggagcttatgcgtcagcttactatgatttcataaatttacaagaaaatactatagaaaaaactttaaaagcatcagatttaatagaatttaaattcccagaaaataatctatctcaattgacagaacaagaaataaatagtctatggagctttgatcaagcaagtgcaaaatatcaatttgagaaatatgtaagagattatactggtggatctctttctgaagacaatggggtagactttaataaaaatactgccctcgacaaaaactatttattaaataataaaattccatcaaacaatgtagaagaagctggaagtaaaaattatgttcattatatcatacagttacaaggagatgatataagttatgaagcaacatgcaatttattttctaaaaatcctaaaaatagtattattatacaacgaaatatgaatgaaagtgcaaaaagctactttttaagtgatgatggagaatctattttagaattaaataaatataggatacctgaaagattaaaaaataaggaaaaagtaaaagtaacctttattggacatggtaaagatgaattcaacacaagcgaatttgctagattaagtgtagattcactttccaatgagataagttcatttttagataccataaaattagatatatcacctaaaaatgtagaagtaaacttacttggatgtaatatgtttagttatgattttaatgttgaagaaacttatcctgggaagttgctattaagtattatggacaaaattacttccactttacctgatgtaaataaaaattctattactataggagcaaatcaatatgaagtaagaattaatagtgagggaagaaaagaacttctggctcactcaggtaaatggataaataaagaagaagctattatgagcgatttatctagtaaagaatacattttttttgattctatagataataagctaaaagcaaagtccaagaatattccaggattagcatcaatatcagaagatataaaaacattattacttgatgcaagtgttagtcctgatacaaaatttattttaaataatcttaagcttaatattgaatcttctattggggattacatttattatgaaaaattagagcctgttaaaaatataattcacaattctatagatgatttaatagatgagttcaatctacttgaaaatgtatctgatgaattatatgaattaaaaaaattaaataatctagatgagaagtatttaatatcttttgaagatatctcaaaaaataattcaacttactctgtaagatttattaacaaaagtaatggtgagtcagtttatgtagaaacagaaaaagaaattttttcaaaatatagcgaacatattacaaaagaaataagtactataaagaatagtataattacagatgttaatggtaatttattggataatatacagttagatcatacttctcaagttaatacattaaacgcagcattctttattcaatcattaatagattatagtagcaataaagatgtactgaatgatttaagtacctcagttaaggttcaactttatgctcaactatttagtacaggtttaaatactatatatgactctatccaattagtaaatttaatatcaaatgcagtaaatgatactataaatgtactacctacaataacagaggggatacctattgtatctactatattagacggaataaacttaggtgcagcaattaaggaattactagacgaacatgacccattactaaaaaaagaattagaagctaaggtgggtgttttagcaataaatatgtcattatctatagctgcaactgtagcttcaattgttggaataggtgctgaagttactattttcttattacctatagctggtatatctgcaggaataccttcattagttaataatgaattaatattgcatgataaggcaacttcagtggtaaactattttaatcatttgtctgaatctaaaaaatatggccctcttaaaacagaagatgataaaattttagttcctattgatgatttagtaatatcagaaatagattttaataataattcgataaaactaggaacatgtaatatattagcaatggaggggggatcaggacacacagtgactggtaatatagatcactttttctcatctccatctataagttctcatattccttcattatcaatttattctgcaataggtatagaaacagaaaatctagatttttcaaaaaaaataatgatgttacctaatgctccttcaagagtgttttggtgggaaactggagcagttccaggtttaagatcattggaaaatgacggaactagattacttgattcaataagagatttatacccaggtaaattttactggagattctatgcttttttcgattatgcaataactacattaaaaccagtttatgaagacactaatattaaaattaaactagataaagatactagaaacttcataatgccaactataactactaacgaaattagaaacaaattatcttattcatttgatggagcaggaggaacttactctttattattatcttcatatccaatatcaacgaatataaatttatctaaagatgatttatggatatttaatattgataatgaagtaagagaaatatctatagaaaatggtactattaaaaaaggaaagttaataaaagatgttttaagtaaaattgatataaataaaaataaacttattataggcaatcaaacaatagatttttcaggcgatatagataataaagatagatatatattcttgacttgtgagttagatgataaaattagtttaataatagaaataaatcttgttgcaaaatcttatagtttgttattgtctggggataaaaattatttgatatccaatttatctaatactattgagaaaatcaatactttaggcctagatagtaaaaatatagcgtacaattacactgatgaatctaataataaatattttggagctatatctaaaacaagtcaaaaaagcataatacattataaaaaagacagtaaaaatatattagaattttataatgacagtacattagaatttaacagtaaagattttattgctgaagatataaatgtatttatgaaagatgatattaatactataacaggaaaatactatgttgataataatactgataaaagtatagatttctctatttctttagttagtaaaaatcaagtaaaagtaaatggattatatttaaatgaatccgtatactcatcttaccttgattttgtgaaaaattcagatggacaccataatacttctaattttatgaatttatttttggacaatataagtttctggaaattgtttgggtttgaaaatataaattttgtaatcgataaatactttacccttgttggtaaaactaatcttggatatgtagaatttatttgtgacaataataaaaatatagatatatattttggtgaatggaaaacatcgtcatctaaaagcactatatttagcggaaatggtagaaatgttgtagtagagcctatatataatcctgatacgggtgaagatatatctacttcactagatttttcctatgaacctctctatggaatagatagatatataaataaagtattgatagcacctgatttatatacaagtttaataaatattaataccaattattattcaaatgagtactaccctgagattatagttcttaacccaaatacattccacaaaaaagtaaatataaatttagatagttcttcttttgagtataaatggtctacagaaggaagtgactttattttagttagatacttagaagaaagtaataaaaaaatattacaaaaaataagaatcaaaggtatcttatctaatactcaatcatttaataaaatgagtatagattttaaagatattaaaaaactatcattaggatatataatgagtaattttaaatcatttaattctgaaaatgaattagatagagatcatttaggatttaaaataatagataataaaacttattactatgatgaagatagtaaattagttaaaggattaatcaatataaataattcattattctattttgatcctatagaatttaacttagtaactggatggcaaactatcaatggtaaaaaatattattttgatataaatactggagcagctttaactagttataaaattattaatggtaaacacttttattttaataatgatggtgtgatgcagttgggagtatttaaaggacctgatggatttgaatattttgcacctgccaatactcaaaataataacatagaaggtcaggctatagtttatcaaagtaaattcttaactttgaatggcaaaaaatattattttgataataactcaaaagcagtcactggatggagaattattaacaatgagaaatattactttaatcctaataatgctattgctgcagtcggattgcaagtaattgacaataataagtattatttcaatcctgacactgctatcatctcaaaaggttggcagactgttaatggtagtagatactactttgatactgataccgctattgcctttaatggttataaaactattgatggtaaacacttttattttgatagtgattgtgtagtgaaaataggtgtgtttagtacctctaatggatttgaatattttgcacctgctaatacttataataataacatagaaggtcaggctatagtttatcaaagtaaattcttaactttgaatggtaaaaaatattactttgataataactcaaaagcagttaccggattgcaaactattgatagtaaaaaatattactttaatactaacactgctgaagcagctactggatggcaaactattgatggtaaaaaatattactttaatactaacactgctgaagcagctactggatggcaaactattgatggtaaaaaatattactttaatactaacactgctatagcttcaactggttatacaattattaatggtaaacatttttattttaatactgatggtattatgcagataggagtgtttaaaggacctaatggatttgaatattttgcacctgctaatacggatgctaacaacatagaaggtcaagctatactttaccaaaatgaattcttaactttgaatggtaaaaaatattactttggtagtgactcaaaagcagttactggatggagaattattaacaataagaaatattactttaatcctaataatgctattgctgcaattcatctatgcactataaataatgacaagtattactttagttatgatggaattcttcaaaatggatatattactattgaaagaaataatttctattttgatgctaataatgaatctaaaatggtaacaggagtatttaaaggacctaatggatttgagtattttgcacctgctaatactcacaataataacatagaaggtcaggctatagtttaccagaacaaattcttaactttgaatggcaaaaaatattattttgataatgactcaaaagcagttactggatggcaaaccattgatggtaaaaaatattactttaatcttaacactgctgaagcagctactggatggcaaactattgatggtaaaaaatattactttaatcttaacactgctgaagcagctactggatggcaaactattgatggtaaaaaatattactttaatactaacactttcatagcctcaactggttatacaagtattaatggtaaacatttttattttaatactgatggtattatgcagataggagtgtttaaaggacctaatggatttgaatactttgcacctgctaatacggatgctaacaacatagaaggtcaagctatactttaccaaaataaattcttaactttgaatggtaaaaaatattactttggtagtgactcaaaagcagttaccggactgcgaactattgatggtaaaaaatattactttaatactaacactgctgttgcagttactggatggcaaactattaatggtaaaaaatactactttaatactaacacttctatagcttcaactggttatacaattattagtggtaaacatttttattttaatactgatggtattatgcagataggagtgtttaaaggacctgatggatttgaatactttgcacctgctaatacagatgctaacaatatagaaggtcaagctatacgttatcaaaatagattcctatatttacatgacaatatatattattttggtaataattcaaaagcggctactggttgggtaactattgatggtaatagatattacttcgagcctaatacagctatgggtgcgaatggttataaaactattgataataaaaatttttactttagaaatggtttacctcagataggagtgtttaaagggtctaatggatttgaatactttgcacctgctaatacggatgctaacaatatagaaggtcaagctatacgttatcaaaatagattcctacatttacttggaaaaatatattactttggtaataattcaaaagcagttactggatggcaaactattaatggtaaagtatattactttatgcctgatactgctatggctgcagctggtggacttttcgagattgatggtgttatatatttctttggtgttgatggagtaaaagcccctgggatatatggctaa

SEQ ID NO: 21 - protein, 2366 aa, Clostridium difficile
MSLVNRKQLEKMANVRFRVQEDEYVAILDALEEYHNMSENTVVEKYLKLKDINSLTDIYIDTYKKSGRNKALKKFKEYLVTEVLELKNNNLTPVEKNLHFVWIGGQINDTAINYINQWKDVNSDYNVNVFYDSNAFLINTLKKTIVESATNDTLESFRENLNDPRFDYNKFYRKRMEIIYDKQKNFINYYKTQREENPDLIIDDIVKIYLSNEYSKDIDELNSYIEESLNKVTENSGNDVRNFEEFKGGESFKLYEQELVERWNLAAASDILRISALKEVGGVYLDVDMLPGIQPDLFESIEKPSSVTVDFWEMVKLEAIMKYKEYIPGYTSEHFDMLDEEVQSSFESVLASKSDKSEIFSSLGDMEASPLEVKIAFNSKGIINQGLISVKDSYCSNLIVKQIENRYKILNNSLNPAISEDNDFNTTTNAFIDSIMAEANADNGRFMMELGKYLRVGFFPDVKTTINLSGPEAYAAAYQDLLMFKEGSMNIHLIEADLRNFEISKTNISQSTEQEMASLWSFDDARAKAQFEEYKKNYFEGSLGEDDNLDFSQNTVVDKEYLLEKISSLARSSERGYIHYIVQLQGDKISYEAACNLFAKTPYDSVLFQKNIEDSEIAYYYNPGDGEIQEIDKYKIPSIISDRPKIKLTFIGHGKDEFNTDIFAGLDVDSLSTEIETAIDLAKEDISPKSIEINLLGCNMFSYSVNVEETYPGKLLLRVKDKVSELMPSISQDSIIVSANQYEVRINSEGRRELLDHSGEWINKEESIIKDISSKEYISFNPKENKIIVKSKNLPELSTLLQEIRNNSNSSDIELEEKVMLAECEINVISNIDTQVVEGRIEEAKSLTSDSINYIKNEFKLIESISDALYDLKQQNELEESHFISFEDILETDEGFSIRFIDKETGESIFVETEKAIFSEYANHITEEISKIKGTIFDTVNGKLVKKVNLDATHEVNTLNAAFFIQSLIEYNSSKESLSNLSVAMKVQVYAQLFSTGLNTITDAAKVVELVSTALDETIDLLPTLSEGLPVIATIIDGVSLGAAIKELSETSDPLLRQEIEAKIGIMAVNLTAATTAIITSSLGIASGFSILLVPLAGISAGIPSLVNNELILRDKATKVVDYFSHISLAESEGAFTSLDDKIMMPQDDLVISEIDFNNNSITLGKCEIWRMEGGSGHTVTDDIDHFFSAPSITYREPHLSIYDVLEVQKEELDLSKDLMVLPNAPNRVFAWETGWTPGLRSLENDGTKLLDRIRDNYEGEFYWRYFAFIADALITTLKPRYEDTNIRINLDSNTRSFIVPVITTEYIREKLSYSFYGSGGTYALSLSQYNMNINIELNENDTWVIDVDNVVRDVTIESDKIKKGDLIENILSKLSIEDNKIILDNHEINFSGTLNGGNGFVSLTFSILEGINAVIEVDLLSKSYKVLISGELKTLMANSNSVQQKIDYIGLNSELQKNIPYSFMDDKGKENGFINCSTKEGLFVSELSDVVLISKVYMDNSKPLFGYCSNDLKDVKVITKDDVIILTGYYLKDDIKISLSFTIQDENTIKLNGVYLDENGVAEILKFMNKKGSTNTSDSLMSFLESMNIKSIFINSLQSNTKLILDTNFIISGTTSIGQFEFICDKDNNIQPYFIKFNTLETKYTLYVGNRQNMIVEPNYDLDDSGDISSTVINFSQKYLYGIDSCVNKVIISPNIYTDEINITPIYEANNTYPEVIVLDTNYISEKINININDLSIRYVWSNDGSDFILMSTDEENKVSQVKIRFTNVFKGNTISDKISFNFSDKQDVSINKVISTFTPSYYVEGLLNYDLGLISLYNEKFYINNFGMMVSGLVYINDSLYYFKPPIKNLITGFTTIGDDKYYFNPDNGGAASVGETIIDGKNYYFSQNGVLQTGVFSTEDGFKYFAPADTLDENLEGEAIDFTGKLTIDENVYYFGDNYRAAIEWQTLDDEVYYFSTDTGRAFKGLNQIGDDKFYFNSDGIMQKGFVNINDKTFYFDDSGVMKSGYTEIDGKYFYFAENGEMQIGVFNTADGFKYFAHHDEDLGNEEGEALSYSGILNFNNKIYYFDDSFTAVVGWKDLEDGSKYYFDEDTAEAYIGISIINDGKYYFNDSGIMQIGFVTINNEVFYFSDSGIVESGMQNIDDNYFYIDENGLVQIGVFDTSDGYKYFAPANTVNDNIYGQAVEYSGLVRVGEDVYYFGETYTIETGWIYDMENESDKYYFDPETKKAYKGINVIDDIKYYFDENGIMRTGLITFEDNHYYFNEDGIMQYGYLNIEDKTFYFSEDGIMQIGVFNTPDGFKYFAHQNTLDENFEGESINYTGWLDLDEKRYYFTDEYIAATGSVIIDGEEYYFDPDTAQLVISE

SEQ ID NO: 22 - DNA, 7101 bp, Clostridium difficile
  source 1..7101: mol_type = genomic DNA
atgagtttagttaatagaaaacagttagaaaaaatggcaaatgtaagatttcgtgttcaggaagatgaatatgtagcaatattggatgctttagaagaatatcataatatgtcagagaatactgtagtcgaaaaatatttaaaattaaaagatataaatagtttaacagatatttatatagatacatataaaaagtctggtagaaataaagccttaaaaaaatttaaggaatacctagttacagaagtattagagctaaagaataataatttaactccagttgagaaaaatttacattttgtttggattggaggtcaaataaatgacactgctattaattatataaatcaatggaaagatgtaaatagtgattataatgttaatgttttttatgatagtaatgcatttttgataaacacattgaaaaaaactatagtagaatcagcaacaaatgatacacttgaatcatttagagaaaacttaaatgaccctagatttgactataataaattttacagaaaacgtatggagataatctatgataagcagaaaaatttcataaattactataaaactcaaagagaagaaaatcctgaccttataattgatgatattgtaaagatatatctttcaaacgagtattcaaaggatatagatgaacttaattcctatattgaagagtcattaaataaagttacagaaaatagtgggaatgatgttagaaactttgaagaatttaaaggtggagagtcattcaaattatatgaacaagagttggtagaaagatggaatttggcagctgcttctgacatattaagaatatctgccttaaaagaagttggtggtgtatatttagatgttgatatgttaccaggaatacaaccagacctatttgagtctatagagaaacctagttcagtaacagtggatttttgggaaatggtaaaattagaagctataatgaaatacaaagaatacataccaggatatacttcagagcattttgatatgttggatgaagaagttcaaagtagttttgaatctgttctagcttctaagtcagataagtcagaaatattctcatcacttggcgatatggaggcatcaccactagaagttaaaattgcatttaatagtaaaggtattataaatcaaggactaatttctgtgaaagactcatattgtagcaatttaatagtaaaacaaatcgagaacagatataagatattgaataatagtttaaatccagctattagcgaggataacgatttcaatactacaacgaatgcttttattgatagtataatggctgaagctaatgcagataatggtagatttatgatggaactaggaaagtatttaagagttggtttcttcccagatgttaaaactactattaacttaagtggccctgaagcatatgcggcagcttatcaagatttattaatgtttaaagaaggtagtatgaatatccatttgatagaagctgacttaagaaactttgaaatctctaaaactaatatttctcaatcaactgaacaagaaatggctagcttatggtcatttgacgatgcaagagctaaagctcaatttgaagaatacaaaaaaaattactttgaaggttctcttggagaagatgacaatcttgacttttctcaaaatacagtagttgacaaggagtatcttttagaaaaaatatcttcattagcaagaagttcagagagaggatatatacactatattgttcagttacaaggagataaaattagttatgaagcagcatgtaacttatttgcaaagactccttatgatagtgtactgtttcagaaaaatatagaagattcagaaattgcatattattataatcctggagatggtgaaatacaagaaatagacaagtataaaattccaagtataatttctgatagacctaagattaaattaacatttattggtcatggtaaagatgaatttaatactgatatatttgcaggtcttgatgtagattcattatccacagaaatagaaacagcaatagatttagctaaagaggatatttctcctaagtcaatagaaataaacttactgggatgtaacatgtttagctattctgtaaatgtagaggagacttatcctgggaaattattacttagagttaaagataaagtatcagaattaatgccatctataagtcaagactctattatagtaagtgcaaatcaatatgaagttagaataaatagtgaaggaagaagagaattattggatcattctggtgaatggataaataaagaagaaagtattataaaggatatttcatcaaaagaatatatatcatttaatcctaaagaaaataaaattatagtaaaatctaaaaatttacctgaattatctacattattacaagaaattagaaacaattctaattcaagtgatattgaactagaagaaaaagtaatgttagcagaatgtgagataaatgttatttcaaatatagatacacaagtggtagaaggaaggattgaagaagctaaaagcttaacttctgactctattaattatataaagaatgaatttaaactaatagaatctatttctgatgcactatacgatttaaaacaacagaatgaattagaagagtctcattttatatcttttgaggatatattggagactgatgaaggctttagtataagatttattgataaagaaactggagaatctatatttgtagaaactgaaaaggcaatattctctgaatatgctaatcatataactgaagagatttctaagataaaaggtactatatttgatactgtaaatggtaagttagtaaaaaaagtaaatttagatgctacacatgaagtgaatactttaaatgctgcattttttatacaatcattaatagaatataatagttctaaagaatctcttagtaatttaagtgtagcaatgaaagttcaagtttatgctcaattatttagtactggtttaaatactattacagatgcagccaaagttgttgaattagtatcaactgcattagatgaaactatagatttacttcctacattatctgaaggattacctgtaattgcaactatcatagatggtgtaagtttaggtgcagcaatcaaagagctaagtgaaacaagtgacccattattaagacaagaaatagaagctaagataggtataatggcagtaaatttaacagcagctacaactgcaatcattacttcatctttaggaatagctagtggatttagtatacttttagttcctttagcaggaatttcagcaggtataccaagtttagtaaacaatgagcttatcctaagagataaagcaacaaaagttgtagattattttagtcatatatcattagctgagtctgaaggagcatttacttcattagatgataaaataatgatgccacaagatgatttagtaatatctgagatagactttaataacaattcaataactttaggtaaatgtgaaatctggagaatggaaggtggctcaggtcatactgtaactgatgatatagatcacttcttttcagcaccatcaataacatatagagagccacacttatctatatatgacgtattggaagtacaaaaagaagaacttgatttgtcaaaagatttaatggtattacctaatgctccaaatagagtatttgcttgggaaacaggatggacaccaggtttaagaagcttagaaaatgatggcacaaaactgttagaccgtataagagataactatgaaggtgagttttattggagatattttgcttttatagctgatgctttaataacaacattaaaaccaagatatgaagatactaatataagaataaatttagatagtaatactagaagctttatagtcccagtgataactacagaatatataagagagaaattatcatattctttttatggttctggaggaacttatgcattatctctttctcaatacaatatgaatataaacatagaattaaatgaaaatgatacttgggttatagatgtcgacaatgtcgtaagagatgtcactatagaatctgataaaattaaaaaaggagatttaatagagaatattttatctaaattaagtattgaagacaataaaattattttagataatcatgaaattaatttctctggaacattaaatggaggtaatggatttgtatctttaacattctcaatcttagaaggaataaatgcagttatagaagttgatttattatctaaatcatataaagttcttatttctggtgaactaaaaacattgatggcaaattcaaattctgttcaacagaaaatagattatataggattgaacagcgaattacaaaaaaatataccttatagttttatggatgataaaggaaaagaaaatggatttattaattgttctacaaaagaaggtttatttgtatctgaattatctgatgtagttcttataagtaaagtttatatggacaatagtaaacctctatttggatattgtagtaatgatttgaaagatgttaaagtcataactaaagatgacgttattatattaacaggatattatttaaaagatgatataaaaatctctctttcttttactatacaagatgaaaatactataaaattaaatggagtatatttagatgaaaatggagtagctgaaatattgaaatttatgaataaaaaaggtagtacaaatacttcagattctttaatgagctttttagaaagtatgaatataaaaagtattttcataaattccttacaatctaatactaagcttatattagatactaattttataataagtggtactacttctattggtcaatttgagtttatttgtgataaagataataatatacaaccatatttcattaagtttaatacactagaaactaaatatactctatatgtaggtaatagacaaaatatgatagtagaaccaaattatgatttagatgattctggagatatatcttcaactgtcattaatttttctcagaaatacctttatggaatagacagttgtgttaataaagttataatttcgccaaatatatatacagatgaaataaacataacacctatatatgaagcaaataatacttatccagaagtgattgtattagatacaaattatataagtgaaaaaatcaatattaatatcaatgatttatctatacgatatgtatggagtaatgatggaagtgattttattcttatgtcaactgatgaagagaacaaggtatcacaagttaaaataagatttactaatgtttttaaaggtaatactatatcagataagatatcttttaattttagtgataagcaagatgtatctataaataaagttatttcaacatttacaccttcatattatgtggaaggattacttaattatgatttaggtctgatttctttatacaatgagaaattttatattaataactttggaatgatggtgtctggattagtatatattaatgattcattatattatttcaagccaccaataaagaacttgataactggatttacaactataggtgatgataaatactactttaatccagataatggtggagctgcttcagtcggagaaacaataattgatggcaaaaactactacttcagccaaaatggagtgttacaaacaggtgtatttagtacagaagatggatttaaatattttgctccagcagatacacttgatgaaaatctagagggggaagcaattgattttactggcaaactaactattgatgaaaatgtttattattttggagataattatagagcagctatagaatggcaaacattagatgatgaagtgtactattttagtacagatacaggtagagcttttaaagggctaaatcaaataggtgatgataaattctatttcaactctgatggtattatgcaaaaaggatttgttaatataaatgataagacattctattttgatgattctggtgtgatgaagtcaggatatactgaaatagatggaaaatatttttactttgctgagaatggagaaatgcaaataggagtatttaatacagcagatggatttaaatattttgctcatcatgatgaagatttaggaaatgaagaaggtgaagcactttcatattctggtatacttaattttaacaataagatttattattttgatgattcatttacagcagtagttggatggaaggatttagaagatggttcaaaatattactttgatgaagatacagcagaagcatatataggtatctcaataattaatgatggtaaatattattttaatgattctggaatcatgcaaattggatttgtcacaataaataatgaagtattttatttctctgattctggaatagtagaatctggaatgcaaaatatagatgataattatttctatatagacgaaaatggtctagttcaaattggtgtatttgacacttcagatggatataaatactttgcaccagctaatactgtaaatgataatatctatggacaagcagttgaatatagtggtttagttagagttggtgaagatgtatattattttggagaaacatatacaattgagactggttggatatatgatatggaaaatgaaagtgataaatattatttcgatccagaaactaaaaaagcatataaaggtattaatgtaattgatgatataaaatactattttgatgagaatggaataatgagaacaggtcttataacatttgaagataatcattactattttaatgaagatggtattatgcaatatggttatctaaatatagaagataagacgttctactttagtgaagatggtattatgcagattggagtatttaatacaccagatggatttaaatattttgcacatcaaaatactttagatgagaattttgagggagaatcaataaactatactggttggttagatttagatgaaaagagatattattttacagatgaatatattgcagcaactggttcagttattattgatggtgaggagtattattttgatcctgatacagctcaattagtgattagtgaatag

SEQ ID NO: 23 - protein, 2366 aa, Clostridium difficile; identical to SEQ ID NO: 21

SEQ ID NO: 24 - DNA, 7101 bp, Clostridium difficile; identical to SEQ ID NO: 22
  source 1..7101: mol_type = genomic DNA

SEQ ID NO: 25 - protein, 2366 aa, Clostridium difficile; identical to SEQ ID NO: 2

SEQ ID NO: 26 - DNA, 7101 bp, Clostridium difficile
  source 1..7101: mol_type = genomic DNA
atgagtttagttaatagaaaacagttagaaaaaatggcaaatgtaagatttcgtactcaagaagatgaatatgttgcaatattggatgctttagaagaatatcataatatgtcagagaatactgtagtcgaaaaatatttaaaattaaaagatataaatagtttaacagatatttatatagatacatataaaaaatctggtagaaataaagccttaaaaaaatttaaggaatatctagttacagaagtattagagctaaagaataataatttaactccagttgagaaaaatttacattttgtttggattggaggtcaaataaatgacactgctattaattatataaatcaatggaaagatgtaaatagtgattataatgttaatgttttttatgatagtaatgcatttttgataaacacattgaaaaaaactgtagtagaatcagcaataaatgatacacttgaatcatttagagaaaacttaaatgaccctagatttgactataataaattcttcagaaaacgtatggaaataatttatgataaacagaaaaatttcataaactactataaagctcaaagagaagaaaatcctgaacttataattgatgatattgtaaagacatatctttcaaatgagtattcaaaggagatagatgaacttaatacctatattgaagaatccttaaataaaattacacagaatagtggaaatgatgttagaaactttgaagaatttaaaaatggagagtcattcaacttatatgaacaagagttggtagaaaggtggaatttagctgctgcttctgacatattaagaatatctgcattaaaagaaattggtggtatgtatttagatgttgatatgttaccaggaatacaaccagacttatttgagtctatagagaaacctagttcagtaacagtggatttttgggaaatgacaaagttagaagctataatgaaatacaaagaatatataccagaatatacctcagaacattttgacatgttagacgaagaagttcaaagtagttttgaatctgttctagcttctaagtcagataaatcagaaatattctcatcacttggtgatatggaggcatcaccactagaagttaaaattgcatttaatagtaagggtattataaatcaagggctaatttctgtgaaagactcatattgtagcaatttaatagtaaaacaaatcgagaatagatataaaatattgaataatagtttaaatccagctattagcgaggataatgattttaatactacaacgaatacctttattgatagtataatggctgaagctaatgcagataatggtagatttatgatggaactaggaaagtatttaagagttggtttcttcccagatgttaaaactactattaacttaagtggccctgaagcatatgcggcagcttatcaagatttattaatgtttaaagaaggcagtatgaatatccatttgatagaagctgatttaagaaactttgaaatctctaaaactaatatttctcaatcaactgaacaagaaatggctagcttatggtcatttgacgatgcaagagctaaagctcaatttgaagaatataaaaggaattattttgaaggttctcttggtgaagatgataatcttgatttttctcaaaatatagtagttgacaaggagtatcttttagaaaaaatatcttcattagcaagaagttcagagagaggatatatacactatattgttcagttacaaggagataaaattagttatgaagcagcatgtaacttatttgcaaagactccttatgatagtgtactgtttcagaaaaatatagaagattcagaaattgcatattattataatcctggagatggtgaaatacaagaaatagacaagtataaaattccaagtataatttctgatagacctaagattaaattaacatttattggtcatggtaaagatgaatttaatactgatatatttgcaggttttgatgtagattcattatccacagaaatagaagcagcaatagatttagctaaagaggatatttctcctaagtcaatagaaataaatttattaggatgtaatatgtttagctactctatcaacgtagaggagacttatcctggaaaattattacttaaagttaaagataaaatatcagaattaatgccatctataagtcaagactctattatagtaagtgcaaatcaatatgaagttagaataaatagtgaaggaagaagagaattattggatcattctggtgaatggataaataaagaagaaagtattataaaggatatttcatcaaaagaatatatatcatttaatcctaaagaaaataaaattacagtaaaatctaaaaatttacctgagctatctacattattacaagaaattagaaataattctaattcaagtgatattgaactagaagaaaaagtaatgttaacagaatgtgagataaatgttatttcaaatatagatacgcaaattgttgaggaaaggattgaagaagctaagaatttaacttctgactctattaattatataaaagatgaatttaaactaatagaatctatttctgatgcactatgtgacttaaaacaacagaatgaattagaagattctcattttatatcttttgaggacatatcagagactgatgagggatttagtataagatttattaataaagaaactggagaatctatatttgtagaaactgaaaaaacaatattctctgaatatgctaatcatataactgaagagatttctaagataaaaggtactatatttgatactgtaaatggtaagttagtaaaaaaagtaaatttagatactacacacgaagtaaatactttaaatgctgcattttttatacaatcattaatagaatataatagttctaaagaatctcttagtaatttaagtgtagcaatgaaagtccaagtttacgctcaattatttagtactggtttaaatactattacagatgcagccaaagttgttgaattagtatcaactgcattagatgaaactatagacttacttcctacattatctgaaggattacctataattgcaactattatagatggtgtaagtttaggtgcagcaatcaaagagctaagtgaaacgagtgacccattattaagacaagaaatagaagctaagataggtataatggcagtaaatttaacaacagctacaactgcaatcattacttcatctttggggatagctagtggatttagtatacttttagttcctttagcaggaatttcagcaggtataccaagcttagtaaacaatgaacttgtacttcgagataaggcaacaaaggttgtagattattttaaacatgtttcattagttgaaactgaaggagtatttactttattagatgataaaataatgatgccacaagatgatttagtgatatcagaaatagattttaataataattcaatagttttaggtaaatgtgaaatctggagaatggaaggtggttcaggtcatactgtaactgatgatatagatcacttcttttcagcaccatcaataacatatagagagccacacttatctatatatgacgtattggaagtacaaaaagaagaacttgatttgtcaaaagatttaatggtattacctaatgctccaaatagagtatttgcttgggaaacaggatggacaccaggtttaagaagcttagaaaatgatggcacaaaactgttagaccgtataagagataactatgaaggtgagttttattggagatattttgcttttatagctgatgctttaataacaacattaaaaccaagatatgaagatactaatataagaataaatttagatagtaatactagaagttttatagttccaataataactacagaatatataagagaaaaattatcatattctttctatggttcaggaggaacttatgcattgtctctttctcaatataatatgggtataaatatagaattaagtgaaagtgatgtttggattatagatgttgataatgttgtgagagatgtaactatagaatctgataaaattaaaaaaggtgatttaatagaaggtattttatctacactaagtattgaagagaataaaattatcttaaatagccatgagattaatttttctggtgaggtaaatggaagtaatggatttgtttctttaacattttcaattttagaaggaataaatgcaattatagaagttgatttattatctaaatcatataaattacttatttctggcgaattaaaaatattgatgttaaattcaaatcatattcaacagaaaatagattatataggattcaatagcgaattacagaaaaatataccatatagctttgtagatagtgaaggaaaagagaatggttttattaatggttcaacaaaagaaggtttatttgtatctgaattacctgatgtagttcttataagtaaggtttatatggatgatagtaagccttcatttggatattatagtaataatttgaaagatgtcaaagttataactaaagataatgttaatatattaacaggttattatcttaaggatgatataaaaatctctctttctttgactctacaagatgaaaaaactataaagttaaatagtgtgcatttagatgaaagtggagtagctgagattttgaagttcatgaatagaaaaggtaatacaaatacttcagattctttaatgagctttttagaaagtatgaatataaaaagtattttcgttaatttcttacaatctaatattaagtttatattagatgctaattttataataagtggtactacttctattggccaatttgagtttatttgtgatgaaaatgataatatacaaccatatttcattaagtttaatacactagaaactaattatactttatatgtaggaaatagacaaaatatgatagtggaaccaaattatgatttagatgattctggagatatatcttcaactgttatcaatttctctcaaaagtatctttatggaatagacagttgtgttaataaagttgtaatttcaccaaatatttatacagatgaaataaatataacgcctgtatatgaaacaaataatacttatccagaagttattgtattagatgcaaattatataaatgaaaaaataaatgttaatatcaatgatctatctatacgatatgtatggagtaatgatggtaatgattttattcttatgtcaactagtgaagaaaataaggtgtcacaagttaaaataagattcgttaatgtttttaaagataagactttggcaaataagctatcttttaactttagtgataaacaagatgtacctgtaagtgaaataatcttatcatttacaccttcatattatgaggatggattgattggctatgatttgggtctagtttctttatataatgagaaattttatattaataactttggaatgatggtatctggattaatatatattaatgattcattatattattttaaaccaccagtaaataatttgataactggatttgtgactgtaggcgatgataaatactactttaatccaattaatggtggagctgcttcaattggagagacaataattgatgacaaaaattattatttcaaccaaagtggagtgttacaaacaggtgtatttagtacagaagatggatttaaatattttgccccagctaatacacttgatgaaaacctagaaggagaagcaattgattttactggaaaattaattattgacgaaaatatttattattttgatgataattatagaggagctgtagaatggaaagaattagatggtgaaatgcactattttagcccagaaacaggtaaagcttttaaaggtctaaatcaaataggtgattataaatactatttcaattctgatggagttatgcaaaaaggatttgttagtataaatgataataaacactattttgatgattctggtgttatgaaagtaggttacactgaaatagatggcaagcatttctactttgctgaaaacggagaaatgcaaataggagtatttaatacagaagatggatttaaatattttgctcatcataatgaagatttaggaaatgaagaaggtgaagaaatctcatattctggtatattaaatttcaataataaaatttactattttgatgattcatttacagctgtagttggatggaaagatttagaggatggttcaaagtattattttgatgaagatacagcagaagcatatataggtttgtcattaataaatgatggtcaatattattttaatgatgatggaattatgcaagttggatttgtcactataaatgataaagtcttctacttctctgactctggaattatagaatctggagtacaaaacatagatgacaattatttctatatagatgataatggtatagttcaaattggtgtatttgatacttcagatggatataaatattttgcacctgctaatactgtaaatgataatatttacggacaagcagttgaatatagtggtttagttagagttggggaagatgtatattattttggagaaacatatacaattgagactggatggatatatgatatggaaaatgaaagtgataaatattatttcaatccagaaactaaaaaagcatgcaaaggtattaatttaattgatgatataaaatattattttgatgagaagggcataatgagaacgggtcttatatcatttgaaaataataattattactttaatgagaatggtgaaatgcaatttggttatataaatatagaagataagatgttctattttggtgaagatggtgtcatgcagattggagtatttaatacaccagatggatttaaatactttgcacatcaaaatactttggatgagaattttgagggagaatcaataaactatactggttggttagatttagatgaaaagagatattattttacagatgaatatattgcagcaactggttcagttattattgatggtgaggagtattattttgatcctgatacagctcaattagtgattagtgaatag

SEQ ID NO: 27 - DNA, 26039 bp, Clostridium difficile
  source 1..26039: mol_type = genomic DNA
agctagtcttggtgtattgttagcaggattttttaatttgccaattgaattagttgcagccgttggctatgctagtgtctttggtagtgctacaaatactttttttgcacctgtatttataggggcagaagtttttggatacagctatttaccttatttctttgtagtatgcgctatttcatatatatttaatatggataaatctatttattcactacaaaaaatttcaacaaaacaataaataaaacaacataatgtatgattagaagagaaagaatattagagaaaggatagggtaggaatatgttgacaagtttagctttgatttttttattaggaatggcctcgggaggtatttttaagaggataaagttacctaacttattgggaatgttacttacaggaattatattaggtccatatgttttaaatttgattgataattcaatactagatatttcttctgaccttagaaagattgcattgattattatattaacaagggctggattatctttagatataaacgatttgaagaaagtgggaagacctgctgtacttatgtgctttattccagctacttttgaaattatcggaatgatagttttagcaccaaagttactaggcgtttctatattggaagcagcagtcatgggtgcagtagtaggagcagtttctcctgcaattattgtacctaaaatgcttaaattaatggaagaaggttatggtacagaaaaaagtattccacagatgcttttagcaggaacttctatagacgatattttcgtaattgtgatgtttacagtattcacaggattggcacaaggaaatagtatatcagctattagttttttacaaattccagtatcaattatattaggtgtaatagctggagcagtgattggaatctgtttagcagtattttttaagaaggttcatatgagagattctgctaaaggggtgttgcttttaagtatctcatttttaatgataagtttagaaactgctttagagggtattgtgccattttctggattattagcagttatgagtattgggattttccttcagataaaatatcgtgtagttgcaagaagattgtctataaagtattcaaaactatgggttggcgctgaaattctcttgtttgttttggtaggggcaacagtagatataagttatgcatttaaagcaggaattggagctgtaattttaatatttggagttcttttattccgtatgtaggagtattcttctgccttattaagacaaatttgacaataaaggaaagattgttctgtatgattggctatattccaaaggctacagtacaggcagcaataggaggtgtaccacttgcaatggggatggcatctggacaacttattttgacgttagcagttctcgctatacttataactgcacctcttggagcttttggaattgatgtaacttataaaaaattattaacttctgtaaaaggcgagagtaagtaaaaataaagattattttaactggtaagttatattttggaaaaggattatactattgaatacaatataaaaaaatcatttgggagattaagaaggtagaagttaagaacagattttaaggtatgttatgattattagaattgattttgtgaaattattattgtaatatttaattatatagataaagaagcggagtgataactatgtgtttaaaaaaattatcaaaattagagttagttattatgaaatttatttggaatttagatataaaaaccaattcatatgagattattgattatatgaaagaagaacataatttaccagaaaaagtagctttaaaaactttatcaaaactatcaaagaaaaaattcttatatgttcaagaaacaggcaagtgtatgtattatacagttgcaataaaagaaaaggcatatttagagtttatatcaagaaatgtgcaaaatcttttgaagaataattttataaggaatttattagtatcatttcacgaagaggagctaacagaggaaaagataaagtcgttagaaaactgggtagtaaattgggaagaagcttatgtataaatgttattatttttattacaatttagataattttggttttgtaagctctgcaactatttttagatggttgcagagtttatttttattttttattcccttaagcaatacttaaaagtaaacgcatttatatttactaacttcaattacttctaatacttaaattactttttaaaaatattttgatatgtcatctctatagtaatctagaacttgtttctattctttatataaagtttttatgaatgatatatataatattcgttcatttgattaaaaataacaaaatattaaataattctactctgatagtttgttaaaaaaataataaaaaatattaataaacaaaaaaaaaattatcttaagagaggagaatgttataatataaaaaggtttctagatttcataaaagatactattttagtcttgaaaatatttagtttgaaaagattttaatttaatgattgattaagttaaaaatgtgtatgtaataaattttattttatttattgactaaattataaagtttacataattatttaataattatgtaattgttacttgaaaattgatctattttaaaatctagttataacttcaaaaaagactgaaaattaagaaaaaagaaatataaatataaaaatatgtcatatagattttttttattttactttaataaaatgatttgtttttacaatactttattaatataaagtttattgctaaaatactttatttattagaaaaagattactaattaattattaaaattaatgtattcataatgcatattttcatataaaatttaatttatttgccgattatataattataattactgatttaattccaatgttgttcaaaattttcaaataaagcatcattataaatataagagagggtgattttatgcaaaagtctttttatgaattaattgttttagcaagaaataactcagtagatgatttgcaagaaattttatttatgtttaagccattagtaaaaaaacttagtagagttttacattatgaagagggagaaacagatttaataatattttttattgaattaataaaaaatattaaattaagtagcttttcagaaaaaagcgatgctattatagtcaaatatattcataaatcattactgaataagacttttgagttgtctagaagatattctaaaatgaagtttaattttgtagaatttgatgaaaatatcttaaatatgaaaaataattatcaaagtaagtctgtttttgaggaagatatttgttttttcgaatatattttgaaagaattatctggtattcaaagaaaagttattttttataaatatttaaaaggatattctgatagagaaatatcagtgaaattaaaaatatctagacaagctgttaataaggctaaaaatagagcatttaaaaaaataaaaaaagactatgaaaattattttaacttgtaattaatgagcttaaagagatatttataatagaaatcaaattttagaattaactttattgtaaaatcaataacttaatctaagaatatcttaatttttatattttatatagaacaaagtttacatatttatttcagacaacgtctttattcaatcgaagagcaaattaatcaactgagtgtcttaaatttaaaatgttaggaagtgaatgtatatgaaaacctaagtagatattagtatattttataaatagaaaggaggatatataaaagagttttagcatttagatgtaaaaatattatagtaaaggagaaaattttatgagtttagttaatagaaaacagttagaaaaaatggcaaatgtaagatttcgtactcaagaagatgaatatgttgcaatattggatgctttagaagaatatcataatatgtcagagaatactgtagtcgaaaaatatttaaaattaaaagatataaatagtttaacagatatttatatagatacatataaaaaatctggtagaaataaagccttaaaaaaatttaaggaatatctagttacagaagtattagagctaaagaataataatttaactccagttgagaaaaatttacattttgtttggattggaggtcaaataaatgacactgctattaattatataaatcaatggaaagatgtaaatagtgattataatgttaatgttttttatgatagtaatgcatttttgataaacacattgaaaaaaactgtagtagaatcagcaataaatgatacacttgaatcatttagagaaaacttaaatgaccctagatttgactataataaattcttcagaaaacgtatggaaataatttatgataaacagaaaaatttcataaactactataaagctcaaagagaagaaaatcctgaacttataattgatgatattgtaaagacatatctttcaaatgagtattcaaaggagatagatgaacttaatacctatattgaagaatccttaaataaaattacacagaatagtggaaatgatgttagaaactttgaagaatttaaaaatggagagtcattcaacttatatgaacaagagttggtagaaaggtggaatttagctgctgcttctgacatattaagaatatctgcattaaaagaaattggtggtatgtatttagatgttgatatgttaccaggaatacaaccagacttatttgagtctatagagaaacctagttcagtaacagtggatttttgggaaatgacaaagttagaagctataatgaaatacaaagaatatataccagaatatacctcagaacattttgacatgttagacgaagaagttcaaagtagttttgaatctgttctagcttctaagtcagataaatcagaaatattctcatcacttggtgatatggaggcatcaccactagaagttaaaattgcatttaatagtaagggtattataaatcaagggctaatttctgtgaaagactcatattgtagcaatttaatagtaaaacaaatcgagaatagatataaaatattgaataatagtttaaatccagctattagcgaggataatgattttaatactacaacgaatacctttattgatagtataatggctgaagctaatgcagataatggtagatttatgatggaactaggaaagtatttaagagttggtttcttcccagatgttaaaactactattaacttaagtggccctgaagcatatgcggcagcttatcaagatttattaatgtttaaagaaggcagtatgaatatccatttgatagaagctgatttaagaaactttgaaatctctaaaactaatatttctcaatcaactgaacaagaaatggctagcttatggtcatttgacgatgcaagagctaaagctcaatttgaagaatataaaaggaattattttgaaggttctcttggtgaagatgataatcttgatttttctcaaaatatagtagttgacaaggagtatcttttagaaaaaatatcttcattagcaagaagttcagagagaggatatatacactatattgttcagttacaaggagataaaattagttatgaagcagcatgtaacttatttgcaaagactccttatgatagtgtactgtttcagaaaaatatagaagattcagaaattgcatattattataatcctggagatggtgaaatacaagaaatagacaagtataaaattccaagtataatttctgatagacctaagattaaattaacatttattggtcatggtaaagatgaatttaatactgatatatttgcaggttttgatgtagattcattatccacagaaatagaagcagcaatagatttagctaaagaggatatttctcctaagtcaatagaaataaatttattaggatgtaatatgtttagctactctatcaacgtagaggagacttatcctggaaaattattacttaaagttaaagataaaatatcagaattaatgccatctataagtcaagactctattatagtaagtgcaaatcaatatgaagttagaataaatagtgaaggaagaagagaattattggatcattctggtgaatggataaataaagaagaaagtattataaaggatatttcatcaaaagaatatatatcatttaatcctaaagaaaataaaattacagtaaaatctaaaaatttacctgagctatctacattattacaagaaattagaaataattctaattcaagtgatattgaactagaagaaaaagtaatgttaacagaatgtgagataaatgttatttcaaatatagatacgcaaattgttgaggaaaggattgaagaagctaagaatttaacttctgactctattaattatataaaagatgaatttaaactaatagaatctatttctgatgcactatgtgacttaaaacaacagaatgaattagaagattctcattttatatcttttgaggacatatcagagactgatgagggatttagtataagatttattaataaagaaactggagaatctatatttgtagaaactgaaaaaacaatattctctgaatatgctaatcatataactgaagagatttctaagataaaaggtactatatttgatactgtaaatggtaagttagtaaaaaaagtaaatttagatactacacacgaagtaaatactttaaatgctgcattttttatacaatcattaatagaatataatagttctaaagaatctcttagtaatttaagtgtagcaatgaaagtccaagtttacgctcaattatttagtactggtttaaatactattacagatgcagccaaagttgttgaattagtatcaactgcattagatgaaactatagacttacttcctacattatctgaaggattacctataattgcaactattatagatggtgtaagtttaggtgcagcaatcaaagagctaagtgaaacgagtgacccattattaagacaagaaatagaagctaagataggtataatggcagtaaatttaacaacagctacaactgcaatcattacttcatctttggggatagctagtggatttagtatacttttagttcctttagcaggaatttcagcaggtataccaagcttagtaaacaatgaacttgtacttcgagataaggcaacaaaggttgtagattattttaaacatgtttcattagttgaaactgaaggagtatttactttattagatgataaaataatgatgccacaagatgatttagtgatatcagaaatagattttaataataattcaatagttttaggtaaatgtgaaatctggagaatggaaggtggttcaggtcatactgtaactgatgatatagatcacttcttttcagcaccatcaataacatatagagagccacacttatctatatatgacgtattggaagtacaaaaagaagaacttgatttgtcaaaagatttaatggtattacctaatgctccaaatagagtatttgcttgggaaacaggatggacaccaggtttaagaagcttagaaaatgatggcacaaaactgttagaccgtataagagataactatgaaggtgagttttattggagatattttgcttttatagctgatgctttaataacaacattaaaaccaagatatgaagatactaatataagaataaatttagatagtaatactagaagttttatagttccaataataactacagaatatataagagaaaaattatcatattctttctatggttcaggaggaacttatgcattgtctctttctcaatataatatgggtataaatatagaattaagtgaaagtgatgtttggattatagatgttgataatgttgtgagagatgtaactatagaatctgataaaattaaaaaaggtgatttaatagaaggtattttatctacactaagtattgaagagaataaaattatcttaaatagccatgagattaatttttctggtgaggtaaatggaagtaatggatttgtttctttaacattttcaattttagaaggaataaatgcaattatagaagttgatttattatctaaatcatataaattacttatttctggcgaattaaaaatattgatgttaaattcaaatcatattcaacagaaaatagattatataggattcaatagcgaattacagaaaaatataccatatagctttgtagatagtgaaggaaaagagaatggttttattaatggttcaacaaaagaaggtttatttgtatctgaattacctgatgtagttcttataagtaaggtttatatggatgatagtaagccttcatttggatattatagtaataatttgaaagatgtcaaagttataactaaagataatgttaatatattaacaggttattatcttaaggatgatataaaaatctctctttctttgactctacaagatgaaaaaactataaagttaaatagtgtgcatttagatgaaagtggagtagctgagattttgaagttcatgaatagaaaaggtaatacaaatacttcagattctttaatgagctttttagaaagtatgaatataaaaagtattttcgttaatttcttacaatctaatattaagtttatattagatgctaattttataataagtggtactacttctattggccaatttgagtttatttgtgatgaaaatgataatatacaaccatatttcattaagtttaatacactagaaactaattatactttatatgtaggaaatagacaaaatatgatagtggaaccaaattatgatttagatgattctggagatatatcttcaactgttatcaatttctctcaaaagtatctttatggaatagacagttgtgttaataaagttgtaatttcaccaaatatttatacagatgaaataaatataacgcctgtatatgaaacaaataatacttatccagaagttattgtattagatgcaaattatataaatgaaaaaataaatgttaatatcaatgatctatctatacgatatgtatggagtaatgatggtaatgattttattcttatgtcaactagtgaagaaaataaggtgtcacaagttaaaataagattcgttaatgtttttaaagataagactttggcaaataagctatcttttaactttagtgataaacaagatgtacctgtaagtgaaataatcttatcatttacaccttcatattatgaggatggattgattggctatgatttgggtctagtttctttatataatgagaaattttatattaataactttggaatgatggtatctggattaatatatattaatgattcattatattattttaaaccaccagtaaataatttgataactggatttgtgactgtaggcgatgataaatactactttaatccaattaatggtggagctgcttcaattggagagacaataattgatgacaaaaattattatttcaaccaaagtggagtgttacaaacaggtgtatttagtacagaagatggatttaaatattttgccccagctaatacacttgatgaaaacctagaaggagaagcaattgattttactggaaaattaattattgacgaaaatatttattattttgatgataattatagaggagctgtagaatggaaagaattagatggtgaaatgcactattttagcccagaaacaggtaaagcttttaaaggtctaaatcaaataggtgattataaatactatttcaattctgatggagttatgcaaaaaggatttgttagtataaatgataataaacactattttgatgattctggtgttatgaaagtaggttacactgaaatagatggcaagcatttctactttgctgaaaacggagaaatgcaaataggagtatttaatacagaagatggatttaaatattttgctcatcataatgaagatttaggaaatgaagaaggtgaagaaatctcatattctggtatattaaatttcaataataaaatttactattttgatgattcatttacagctgtagttggatggaaagatttagaggatggttcaaagtattattttgatgaagatacagcagaagcatatataggtttgtcattaataaatgatggtcaatattattttaatgatgatggaattatgcaagttggatttgtcactataaatgataaagtcttctacttctctgactctggaattatagaatctggagtacaaaacatagatgacaattatttctatatagatgataatggtatagttcaaattggtgtatttgatacttcagatggatataaatattttgcacctgctaatactgtaaatgataatatttacggacaagcagttgaatatagtggtttagttagagttggggaagatgtatattattttggagaaacatatacaattgagactggatggatatatgatatggaaaatgaaagtgataaatattatttcaatccagaaactaaaaaagcatgcaaaggtattaatttaattgatgatataaaatattattttgatgagaagggcataatgagaacgggtcttatatcatttgaaaataataattattactttaatgagaatggtgaaatgcaatttggttatataaatatagaagataagatgttctattttggtgaagatggtgtcatgcagattggagtatttaatacaccagatggatttaaatactttgcacatcaaaatactttggatgagaattttgagggagaatcaataaactatactggttggttagatttagatgaaaagagatattattttacagatgaatatattgcagcaactggttcagttattattgatggtgaggagtattattttgatcctgatacagctcaattagtgattagtgaatagataaaaatatgttaaatatatcctcttatacttaaatatataaaaataaacaaaatgatacactacataaagtgttctatctaatatgaagatttaccaataaaaaggtggactatgatgaatgcacagtagttcacctttttatatttctaatggtaacaaaatatttttttatataaacctaggaggcgttatgaatatgacaatatcttttttatcagagcatatatttataaagttagtaattttaactatatcatttgatacattattaggatgtttaagtgcaataaaaagtcgtaaatttaattctagttttggaatagatggaggaatcagaaaagtagcaatgatagcatgtatattttttttatcagtagttgacattcttacaaagtttaactttttatttatgttaccacaagattgtatcaattttttaagactaaaacatcttggaatatctgaatttttctctattttatttattttatatgaaagtgtaagtatattaaaaaatatgtgcttatgtggattaccagtacctaagagattaaaggaaaaaatagcaattttactagatgcaatgacagatgaaatgaatgctaaggatgaaaagtaagtaatggtagatataataaagatattaacaaataaaaagtgttatccaaataagaatagctgaaagttatcataattcatgaaactaataatgaaaacgagggagcagatgccaagagacacacaagtattaaatacatataatttcgaagcaagtgttcattactatatagatgacaaggtagtatatcaaacattggttcacaaagatggtgcatggtcagttggtaaaatctattaagctacattagttacagatatcacaaactataatagttaaacatagaaatatgtgtaaattgtgatggaaattattcaaaaacacaaaaatacgtgatgaaggacaaaatgatatagaaaataagtatcaaaccttaataaatgatttaattgatagtttaaaagttataggaaaaatatataaagaaataaaaacattaaaaaaatataagatatgtttacaaattactatcagacaatctccttatctaatagaagagtcaattaactaattgagtatctttaaattgaaatgttaggaagtgatttaaatatgaaaacttaaattataaaaaatcaatattaatttatttttaaaaaatagaaaggagtgtataagatttattttcaaagtttaaaaacaagaaaatcaatttaaatttcagaaggaataaatgtggttatagaagtggatttattatcaaaaataataatactaggaggtttttatgtctttaatatctaaagaagagttaataaaactcgcatatagcattagaccaagagaaaatgagtataaaactatactaactaatttagacgaatataataagttaactacaaacaataatgaaaataaatatttgcaattaaaaaaactaaatgaatcaattgatgtttttatgaataaatataaaacttcaagcagaaatagagcactctctaatctaaaaaaagatatattaaaagaagtaattcttattaaaaattccaatacaagccctgtagaaaaaaatttacattttgtatggataggtggagaagtcagtgatattgctcttgaatacataaaacaatgggctgatattaatgcagaatataatattaaactgtggtatgatagtgaagcattcttagtaaatacactaaaaaaggctatagttgaatcttctaccactgaagcattacagctactagaggaagagattcaaaatcctcaatttgataatatgaaattttacaaaaaaaggatggaatttatatatgatagacaaaaaaggtttataaattattataaatctcaaatcaataaacctacagtacctacaatagatgatattataaagtctcatctagtatctgaatataatagagatgaaactgtattagaatcatatagaacaaattctttgagaaaaataaatagtaatcatgggatagatatcagggctaatagtttgtttacagaacaagagttattaaatatttatagtcaggagttgttaaatcgtggaaatttagctgcagcatctgacatagtaagattattagccctaaaaaattttggcggagtatatttagatgttgatatgcttccaggtattcactctgatttatttaaaacaatatctagacctagctctattggactagaccgttgggaaatgataaaattagaggctattatgaagtataaaaaatatataaataattatacatcagaaaactttgataaacttgatcaacaattaaaagataattttaaactcattatagaaagtaaaagtgaaaaatctgagatattttctaaattagaaaatttaaatgtatctgatcttgaaattaaaatagctttcgctttaggcagtgttataaatcaagccttgatatcaaaacaaggttcatatcttactaacctagtaatagaacaagtaaaaaatagatatcaatttttaaaccaacaccttaacccagccatagagtctgataataacttcacagatactactaaaatttttcatgattcattatttaattcagctaccgcagaaaactctatgtttttaacaaaaatagcaccatacttacaagtaggttttatgccagaagctcgctccacaataagtttaagtggtccaggagcttatgcgtcagcttactatgatttcataaatttacaagaaaatactatagaaaaaactttaaaagcatcagatttaatagaatttaaattcccagaaaataatctatctcaattgacagaacaagaaataaatagtctatggagctttgatcaagcaagtgcaaaatatcaatttgagaaatatgtaagagattatactggtggatctctttctgaagacaatggggtagactttaataaaaatactgccctcgacaaaaactatttattaaataataaaattccatcaaacaatgtagaagaagctggaagtaaaaattatgttcattatatcatacagttacaaggagatgatataagttatgaagcaacatgcaatttattttctaaaaatcctaaaaatagtattattatacaacgaaatatgaatgaaagtgcaaaaagctactttttaagtgatgatggagaatctattttagaattaaataaatataggatacctgaaagattaaaaaataaggaaaaagtaaaagtaacctttattggacatggtaaagatgaattcaacacaagcgaatttgctagattaagtgtagattcactttccaatgagataagttcatttttagataccataaaattagatatatcacctaaaaatgtagaagtaaacttacttggatgtaatatgtttagttatgattttaatgttgaagaaacttatcctgggaagttgctattaagtattatggacaaaattacttccactttacctgatgtaaataaaaattctattactataggagcaaatcaatatgaagtaagaattaatagtgagggaagaaaagaacttctggctcactcaggtaaatggataaataaagaagaagctattatgagcgatttatctagtaaagaatacattttttttgattctatagataataagctaaaagcaaagtccaagaatattccaggattagcatcaatatcagaagatataaaaacattattacttgatgcaagtgttagtcctgatacaaaatttattttaaataatcttaagcttaatattgaatcttctattggggattacatttattatgaaaaattagagcctgttaaaaatataattcacaattctatagatgatttaatagatgagttcaatctacttgaaaatgtatctgatgaattatatgaattaaaaaaattaaataatctagatgagaagtatttaatatcttttgaagatatctcaaaaaataattcaacttactctgtaagatttattaacaaaagtaatggtgagtcagtttatgtagaaacagaaaaagaaattttttcaaaatatagcgaacatattacaaaagaaataagtactataaagaatagtataattacagatgttaatggtaatttattggataatatacagttagatcatacttctcaagttaatacattaaacgcagcattctttattcaatcattaatagattatagtagcaataaagatgtactgaatgatttaagtacctcagttaaggttcaactttatgctcaactatttagtacaggtttaaatactatatatgactctatccaattagtaaatttaatatcaaatgcagtaaatgatactataaatgtactacctacaataacagaggggatacctattgtatctactatattagacggaataaacttaggtgcagcaattaaggaattactagacgaacatgacccattactaaaaaaagaattagaagctaaggtgggtgttttagcaataaatatgtcattatctatagctgcaactgtagcttcaattgttggaataggtgctgaagttactattttcttattacctatagctggtatatctgcaggaataccttcattagttaataatgaattaatattgcatgataaggcaacttcagtggtaaactattttaatcatttgtctgaatctaaaaaatatggccctcttaaaacagaagatgataaaattttagttcctattgatgatttagtaatatcagaaatagattttaataataattcgataaaactaggaacatgtaatatattagcaatggaggggggatcaggacacacagtgactggtaatatagatcactttttctcatctccatctataagttctcatattccttcattatcaatttattctgcaataggtatagaaacagaaaatctagatttttcaaaaaaaataatgatgttacctaatgctccttcaagagtgttttggtgggaaactggagcagttccaggtttaagatcattggaaaatgacggaactagattacttgattcaataagagatttatacccaggtaaattttactggagattctatgcttttttcgattatgcaataactacattaaaaccagtttatgaagacactaatattaaaattaaactagataaagatactagaaacttcataatgccaactataactactaacgaaattagaaacaaattatcttattcatttgatggagcaggaggaacttactctttattattatcttcatatccaatatcaacgaatataaatttatctaaagatgatttatggatatttaatattgataatgaagtaagagaaatatctatagaaaatggtactattaaaaaaggaaagttaataaaagatgttttaagtaaaattgatataaataaaaataaacttattataggcaatcaaacaatagatttttcaggcgatatagataataaagatagatatatattcttgacttgtgagttagatgataaaattagtttaataatagaaataaatcttgttgcaaaatcttatagtttgttattgtctggggataaaaattatttgatatccaatttatctaatactattgagaaaatcaatactttaggcctagatagtaaaaatatagcgtacaattacactgatgaatctaataataaatattttggagctatatctaaaacaagtcaaaaaagcataatacattataaaaaagacagtaaaaatatattagaattttataatgacagtacattagaatttaacagtaaagattttattgctgaagatataaatgtatttatgaaagatgatattaatactataacaggaaaatactatgttgataataatactgataaaagtatagatttctctatttctttagttagtaaaaatcaagtaaaagtaaatggattatatttaaatgaatccgtatactcatcttaccttgattttgtgaaaaattcagatggacaccataatacttctaattttatgaatttatttttggacaatataagtttctggaaattgtttgggtttgaaaatataaattttgtaatcgataaatactttacccttgttggtaaaactaatcttggatatgtagaatttatttgtgacaataataaaaatatagatatatattttggtgaatggaaaacatcgtcatctaaaagcactatatttagcggaaatggtagaaatgttgtagtagagcctatatataatcctgatacgggtgaagatatatctacttcactagatttttcctatgaacctctctatggaatagatagatatataaataaagtattgatagcacctgatttatatacaagtttaataaatattaataccaattattattcaaatgagtactaccctgagattatagttcttaacccaaatacattccacaaaaaagtaaatataaatttagatagttcttcttttgagtataaatggtctacagaaggaagtgactttattttagttagatacttagaagaaagtaataaaaaaatattacaaaaaataagaatcaaaggtatcttatctaatactcaatcatttaataaaatgagtatagattttaaagatattaaaaaactatcattaggatatataatgagtaattttaaatcatttaattctgaaaatgaattagatagagatcatttaggatttaaaataatagataataaaacttattactatgatgaagatagtaaattagttaaaggattaatcaatataaataattcattattctattttgatcctatagaatttaacttagtaactggatggcaaactatcaatggtaaaaaatattattttgatataaatactggagcagctttaactagttataaaattattaatggtaaacacttttattttaataatgatggtgtgatgcagttgggagtatttaaaggacctgatggatttgaatattttgcacctgccaatactcaaaataataacatagaaggtcaggctatagtttatcaaagtaaattcttaactttgaatggcaaaaaatattattttgataataactcaaaagcagtcactggatggagaattattaacaatgagaaatattactttaatcctaataatgctattgctgcagtcggattgcaagtaattgacaataataagtattatttcaatcctgacactgctatcatctcaaaaggttggcagactgttaatggtagtagatactactttgatactgataccgctattgcctttaatggttataaaactattgatggtaaacacttttattttgatagtgattgtgtagtgaaaataggtgtgtttagtacctctaatggatttgaatattttgcacctgctaatacttataataataacatagaaggtcaggctatagtttatcaaagtaaattcttaactttgaatggtaaaaaatattactttgataataactcaaaagcagttaccggattgcaaactattgatagtaaaaaatattactttaatactaacactgctgaagcagctactggatggcaaactattgatggtaaaaaatattactttaatactaacactgctgaagcagctactggatggcaaactattgatggtaaaaaatattactttaatactaacactgctatagcttcaactggttatacaattattaatggtaaacatttttattttaatactgatggtattatgcagataggagtgtttaaaggacctaatggatttgaatattttgcacctgctaatacggatgctaacaacatagaaggtcaagctatactttaccaaaatgaattcttaactttgaatggtaaaaaatattactttggtagtgactcaaaagcagttactggatggagaattattaacaataagaaatattactttaatcctaataatgctattgctgcaattcatctatgcactataaataatgacaagtattactttagttatgatggaattcttcaaaatggatatattactattgaaagaaataatttctattttgatgctaataatgaatctaaaatggtaacaggagtatttaaaggacctaatggatttgagtattttgcacctgctaatactcacaataataacatagaaggtcaggctatagtttaccagaacaaattcttaactttgaatggcaaaaaatattattttgataatgactcaaaagcagttactggatggcaaaccattgatggtaaaaaatattactttaatcttaacactgctgaagcagctactggatggcaaactattgatggtaaaaaatattactttaatcttaacactgctgaagcagctactggatggcaaactattgatggtaaaaaatattactttaatactaacactttcatagcctcaactggttatacaagtattaatggtaaacatttttattttaatactgatggtattatgcagataggagtgtttaaaggacctaatggatttgaatactttgcacctgctaatacggatgctaacaacatagaaggtcaagctatactttaccaaaataaattcttaactttgaatggtaaaaaatattactttggtagtgactcaaaagcagttaccggactgcgaactattgatggtaaaaaatattactttaatactaacactgctgttgcagttactggatggcaaactattaatggtaaaaaatactactttaatactaacacttctatagcttcaactggttatacaattattagtggtaaacatttttattttaatactgatggtattatgcagataggagtgtttaaaggacctgatggatttgaatactttgcacctgctaatacagatgctaacaatatagaaggtcaagctatacgttatcaaaatagattcctatatttacatgacaatatatattattttggtaataattcaaaagcggctactggttgggtaactattgatggtaatagatattacttcgagcctaatacagctatgggtgcgaatggttataaaactattgataataaaaatttttactttagaaatggtttacctcagataggagtgtttaaagggtctaatggatttgaatactttgcacctgctaatacggatgctaacaatatagaaggtcaagctatacgttatcaaaatagattcctacatttacttggaaaaatatattactttggtaataattcaaaagcagttactggatggcaaactattaatggtaaagtatattactttatgcctgatactgctatggctgcagctggtggacttttcgagattgatggtgttatatatttctttggtgttgatggagtaaaagcccctgggatatatggctaaaatatatgtttgataaaaaattattcctgtgctactaagaaattatttttatataataaatattgagatttaattaaaagtcatgtgttattgtaatacatgacttttagttaaaatttttctatcatttaataatctattattcttgactattttataataaaattcatatatggaaatattaatactaaataattaatagttgataaaaaatagataatatgctaaaagcaaaaactaatttagagccttgtaactgtttatttgcaattataaaaacatctttaaacatattgactataatataaaatattaactataatacaaaacaatattaattaattttctctacagctatccctggtatagttatatttccacccatagttgattcataagttatagttccagcacttatacctcttatagttatgtaatcatcctctaatactcttgaaggagttattgattttttataactacatagtacaaccttatcataatttccagacacagctaatcttatttgcacctcatcaccatcttcaataacttgaataaccttaccttcaaatttaccttttgtactataatcatcaggtgttctagctaattggtcataagtaataccagtatcatatcctttcttctcctcttcttcttttttgcgttgttcttcagcctttttagcttcttcagcttttttagcttcttcagctttacgttgattttcagcttcaatagctttcttttcgtcgtctttcattttgaaccatggttcagcatcagacaatttgctatttaaagtttctatttctgttttttgagaatctataactgatgtttggttagaaatgacctcctcatggtcttcagaacaagctggtgaggatatattgccaaaaaacacgcctaaaataaatgccagtagagcaataccctttgtgctcttaaagaatttaattattttcttagagcttccttttccttcattactaaattcgttaccctcattttttttagaaaacataatacaatctcccttttattagatatattttattttaaaagttaaaaacttaaaataactagttgactaaaaattatatattcatattttcctaaaatatatttcccctaagcataattttacaaaataaagtaagaagattcaatatattttgaaaaaataagataaaaatgtcagattataatataattttcttgaaggtgaattttatatattaaattaaacataaagtattttatttgtataaaactatattatgatgtaattaagtgactcagtgatttagaggtggtaaaatatatatatatgaaagagcataaataaattgatataataaaaaattaaatattaaatattaactataataaaaaaatatctggtaataggtataatataaaaagaatataccagaaagaaggtgaagtatgggagaactacaaaaaattccaggggtagggaaagcaacagaaaaatctttaatcatgttaggatatacaactattaaatcacttaaagatgcaaacccagcacaaatgtatgaaaaggaatgtttaatgcgtggacagcacatagacagatgtcagttatatgtatacagatgtgcagtatattttgcatcaactgaaaatccagaaccagaaaaattaaagtggtggtattggaaagattaaaaaatcaaaaaagttagacataaaaaagagttgaatatccgttttaaataataaaaactaatactcaactcttttttagtcgtaaattttatgtaaatctatttgtatggctaaatatacccatcaataaatgtataaatataccaatcaacaaatgactaaacatactacctaacaaaggattaaataaattacttaacaaagcattctaaaacaattaattagaaactgtttcttcaagccattttctacattgctcaatatttaccatagggtcaaaaccttggtcttttcccttatttaaaagcatatcacaagggaaagtatcacattcaccacaatgattaagttccttactttcacagcaagttttaaccttacattctccaccccaaaatggtttttccatagttgggcaaccagtgcaatttacttgttctttttttgtacaactgtcacaacagacaccacatcttgattcaaacatgttcaaacatcctttccattatttaaaaatattataaaatgattttagatgaatacaaaagtgcaaatagttgattttaggtcatctaaatgttaaacataaagttattagtactggtaaatttataaaaactattccaaaaatctttttgaatatttcaaaacacaataaattacttcaaatccctttgaatatattttacagcattatagattgctttaaatctctttgaatattctacaagactatagattagtttaaatctctttgagtattctacaagactatagattagtttaaatccctttgaatatttcaaaacaccatagattactttaaattcctttgaatattctataacactataaattacttttaacttttatataaccataaagtttttatctggcactttaaatggagttttatatcaaatttgccttccatcgaataaccaaacttaatttaattacacattccaagagtcaaatattcattcaatatatttgataattctatgttatagctataattaaatatagattattaaagttaaatatttatttaatatattgaatgattttttacctatatttaattaagtttcattatataatataaaaattgtttttgcattaagttttaatataatacataataattttaaataataatattattatatattttttaattttaggagtatatctattatatagcgagtagataaaacatataaaattcaaataaaagatatatatttttaaattaaaatggatatagatttcaactaaaaagaatataaatttcaaacccaaaaatatctagcatttaccattaagaaataacatcattctttctaaaatttctattggcaatttcagaaaatactatagtagtaataaatgcaacacatattgtaactatagtgtcattaacatttaaagcagattgctttataacccccatacgactacctaacatagaataagggaaaaatataccaacagcaggttttgctactattaatcccataccaaatagagaaaggcaaagactaataccaataggagttgcaaaacttctaatctttatagacatgtataattgtatagaagctattgaaatagaaataatccaacctttagcaatccaaccagtcaattctttaggtacactaccagaaaaaccaaacatatttcctgcaactatataaaagataacaaagaaaacttgtgtaatagctgtaagtattgaaactactgtaagtttagataaaaagatattttttaaattaactggcagtgtcattacattattccaattatgattcatatgttcaagcctacaaatatatgcacaaaagattgcgattaagataggaaagaaaaattccccataaaaaagactaacttgagtccataagctgtaccattcttttttgagtatgccttgatttagataaaaattaccagaaccaatcaacacacttataagtggcaaagctagtaatacataccatataaaagaattttttaactttagaatttctcccaaaactgacttccttaacatttaaatccctcctatacttctttttttaataaatgatttcttccaatataataaattagcattccaattaagaaaactaaaatcgtaatagaaaaattcatatcaattctatagacagatgaacctaaaacattatcataagcataacttaaaggtgataactctaggtaataagaccatataaacaatctacgaataccttgataaaacaaacctgatgtcaaacctataaaactaccaatcatgccaaatgtaattgcaatcatttgatttggaattacagttgcaatccataggtgtagtgcaatgatagcaatacttacaagaattgttcctaatgtgtattttaaaagtaaagatacagaaattgactcaataacccctctaaaatgtccaaacaacacaatagataacacttgcatcaatacaggtatagataccaaaatagcagaacataaaaatttagataaataaatagtatttaaagatgtcacagaagattttaaaagcttccatgtatctcctttatgttctatatcgcttatacgtgatgtaattattgatattaagataggaaagaatagaccatttaaacttgcaaaactcataagcatataggaatattcaaatccacctaacatatctggattacgtgtaatagccctatttgaatttacgatacaccacattatttcaacagctacaaataaaaaggtcatcagaataatcttctttcttttaagtttataaaattctagaccaaggtatttcattataaagtcaccgccttaccagtaattctaagaatatatcttccaagctttttttatgttcttctattctaaatacatctatatttgaatggacaagcataccatttattttagcgacatctgagtcttttaaattttcaatagtcaagtacccatcttgtataagtgacatatatcctttagtatttaatagtttttgtgcagatacaacattcttagttttgatagcaatctgactttgacctctattatgaagttcttttatgctatcttgaaaaaccagttcgccatgatttattattcctattgatgtggcaatttggtcaatttcacttaaaagatggctagagattagaacagtcatcccgtatttttctggtagagattttattaattctctaatttcctcaatccctgctgggtcgagtccatttgtaggttcatcaagtattaataatttgggaaacttcattattgccatagcaatgccaagacgttgcttcatacctaaagaatattgactaacttttttatttttttgattttctaaccttacaatttttaatgcttcatttacattttttttaggtaaatctaagagtctttgcattatggtcatgttttcaagccctgtaagatgaccatagtatgatggagattctatcaaagaacctatatcttttaaaattgatattctatttttttcatttaactctttacctaaaatattaatatttccttgtgtgggtttagcaagtccaagaagcattttaagagtggtagattttccagctccattaggacccaaaaaaccatatacagctccttgtggaactcttaggtctatatcctttactctaaatattttattgtattcctttgaaagtctttgtgttctaattatcatttccatatgtttcatccccttttttaatctgtgcttattgattcttttaacttatatcagtataataacttggttacatttcaattagctgaaatttaccttacaataaccttaaaagtctatttaggcaaagttgtgaaaatgggtatatggtatac

SEQ ID NO: 28 - protein, 193 aa, Clostridium difficile
WIGGEVSDIALEYIKQWADINAEYNIKLWYDSEAFLVNTLKKAIVESSTTEALQLLEEEIQNPQFDNMKFYKKRMEFIYDRQKRFINYYKSQINKPTVPTIDDIIKSHLVSEYNRDETVLESYRTNSLRKINSNHGIDIRANSLFTEQELLNIYSQELLNRGNLAAASDIVRLLALKNFGGVYLDVDMLPGIH

SEQ ID NO: 29 - protein, 542 aa, Clostridium difficile
MSLISKEELIKLAYSIRPRENEYKTILTNLDEYNKLTTNNNENKYLQLKKLNESIDVFMNKYKTSSRNRALSNLKKDILKEVILIKNSNTSPVEKNLHFVWIGGEVSDIALEYIKQWADINAEYNIKLWYDSEAFLVNTLKKAIVESSTTEALQLLEEEIQNPQFDNMKFYKKRMEFIYDRQKRFINYYKSQINKPTVPTIDDIIKSHLVSEYNRDETVLESYRTNSLRKINSNHGIDIRANSLFTEQELLNIYSQELLNRGNLAAASDIVRLLALKNFGGVYLDVDMLPGIHSDLFKTISRPSSIGLDRWEMIKLEAIMKYKKYINNYTSENFDKLDQQLKDNFKLIIESKSEKSEIFSKLENLNVSDLEIKIAFALGSVINQALISKQGSYLTNLVIEQVKNRYQFLNQHLNPAIESDNNFTDTTKIFHDSLFNSATAENSMFLTKIAPYLQVGFMPEARSTISLSGPGAYASAYYDFINLQENTIEKTLKASDLIEFKFPENNLSQLTEQEINSLWSFDQASAKYQFEKYVRDYTGGSL

SEQ ID NO: 30 - protein, 193 aa, Clostridium difficile
VWIGGQINDTAINYINQWKDVNSDYNVNVFYDSNAFLINTLKKTVVESAINDTLESFRENLNDPRFDYNKFFRKRMEIIYDKQKNFINYYKAQREENPELIIDDIVKTYLSNEYSKEIDELNTYIEESLNKITQNSGNDVRNFEEFKNGESFNLYEQELVERWNLAAASDILRISALKEIGGMYLDVDMLPGI

SEQ ID NO: 31 - protein, 543 aa, Clostridium difficile
MSLVNRKQLEKMANVRFRTQEDEYVAILDALEEYHNMSENTVVEKYLKLKDINSLTDIYIDTYKKSGRNKALKKFKEYLVTEVLELKNNNLTPVEKNLHFVWIGGQINDTAINYINQWKDVNSDYNVNVFYDSNAFLINTLKKTVVESAINDTLESFRENLNDPRFDYNKFFRKRMEIIYDKQKNFINYYKAQREENPELIIDDIVKTYLSNEYSKEIDELNTYIEESLNKITQNSGNDVRNFEEFKNGESFNLYEQELVERWNLAAASDILRISALKEIGGMYLDVDMLPGIQPDLFESIEKPSSVTVDFWEMTKLEAIMKYKEYIPEYTSEHFDMLDEEVQSSFESVLASKSDKSEIFSSLGDMEASPLEVKIAFNSKGIINQGLISVKDSYCSNLIVKQIENRYKILNNSLNPAISEDNDFNTTTNTFIDSIMAEANADNGRFMMELGKYLRVGFFPDVKTTINLSGPEAYAAAYQDLLMFKEGSMNIHLIEADLRNFEISKTNISQSTEQEMASLWSFDDARAKAQFEEYKRNYFEGSL

SEQ ID NO: 32 - protein, 267 aa, Clostridium difficile
SEDNGVDFNKNTALDKNYLLNNKIPSNNVEEAGSKNYVHYIIQLQGDDISYEATCNLFSKNPKNSIIIQRNMNESAKSYFLSDDGESILELNKYRIPERLKNKEKVKVTFIGHGKDEFNTSEFARLSVDSLSNEISSFLDTIKLDISPKNVEVNLLGCNMFSYDFNVEETYPGKLLLSIMDKITSTLPDVNKNSITIGANQYEVRINSEGRKELLAHSGKWINKEEAIMSDLSSKEYIFFDSIDNKLKAKSKNIPGLASISEDIKTL

SEQ ID NO: 33 - protein, 224 aa, Clostridium difficile
GEDDNLDFSQNIVVDKEYLLEKISSLARSSERGYIHYIVQLQGDKISYEAACNLFAKTPYDSVLFQKNIEDSEIAYYYNPGDGEIQEIDKYKIPSIISDRPKIKLTFIGHGKDEFNTDIFAGFDVDSLSTEIEAAIDLAKEDISPKSIEINLLGCNMFSYSINVEETYPGKLLLKVKDKISELMPSISQDSIIVSANQYEVRINSEGRRELLDHSGEWINKEES

SEQ ID NO: 34 - protein, 2710 aa, synthetic construct
  REGION 1..2710: note = Synthetic amino acid sequence: mutant C. difficile TcdA
  SITE 101: note = MISC_FEATURE - Xaa is any amino acid
  SITE 269: note = MISC_FEATURE - Xaa is any amino acid
  SITE 272: note = MISC_FEATURE - Xaa is any amino acid
  SITE 285: note = MISC_FEATURE - Xaa is any amino acid
  SITE 287: note = MISC_FEATURE - Xaa is any amino acid
  SITE 460: note = MISC_FEATURE - Xaa is any amino acid
  SITE 462: note = MISC_FEATURE - Xaa is any amino acid
  SITE 541: note = MISC_FEATURE - Xaa is any amino acid
  SITE 542: note = MISC_FEATURE - Xaa is any amino acid
  SITE 543: note = MISC_FEATURE - Xaa is any amino acid
  SITE 589: note = MISC_FEATURE - Xaa is any amino acid.
  SITE 655: note = MISC_FEATURE - Xaa is any amino acid.
  SITE 700: note = MISC_FEATURE - Xaa is any amino acid.
MSLISKEELIKLAYSIRPRENEYKTILTNLDEYNKLTTNNNENKYLQLKKLNESIDVFMNKYKTSSRNRALSNLKKDILKEVILIKNSNTSPVEKNLHFVXIGGEVSDIALEYIKQWADINAEYNIKLWYDSEAFLVNTLKKAIVESSTTEALQLLEEEIQNPQFDNMKFYKKRMEFIYDRQKRFINYYKSQINKPTVPTIDDIIKSHLVSEYNRDETVLESYRTNSLRKINSNHGIDIRANSLFTEQELLNIYSQELLNRGNLAAASXIVXLLALKNFGGVYLXVXMLPGIHSDLFKTISRPSSIGLDRWEMIKLEAIMKYKKYINNYTSENFDKLDQQLKDNFKLIIESKSEKSEIFSKLENLNVSDLEIKIAFALGSVINQALISKQGSYLTNLVIEQVKNRYQFLNQHLNPAIESDNNFTDTTKIFHDSLFNSATAENSMFLTKIAPYLQVGFMPXAXSTISLSGPGAYASAYYDFINLQENTIEKTLKASDLIEFKFPENNLSQLTEQEINSLWSFDQASAKYQFEKYVRDYTGGXXXEDNGVDFNKNTALDKNYLLNNKIPSNNVEEAGSKNYVHYIIQLQGXDISYEATCNLFSKNPKNSIIIQRNMNESAKSYFLSDDGESILELNKYRIPERLKNKEKVKVTFIGXGKDEFNTSEFARLSVDSLSNEISSFLDTIKLDISPKNVEVNLLGXNMFSYDFNVEETYPGKLLLSIMDKITSTLPDVNKNSITIGANQYEVRINSEGRKELLAHSGKWINKEEAIMSDLSSKEYIFFDSIDNKLKAKSKNIPGLASISEDIKTLLLDASVSPDTKFILNNLKLNIESSIGDYIYYEKLEPVKNIIHNSIDDLIDEFNLLENVSDELYELKKLNNLDEKYLISFEDISKNNSTYSVRFINKSNGESVYVETEKEIFSKYSEHITKEISTIKNSIITDVNGNLLDNIQLDHTSQVNTLNAAFFIQSLIDYSSNKDVLNDLSTSVKVQLYAQLFSTGLNTIYDSIQLVNLISNAVNDTINVLPTITEGIPIVSTILDGINLGAAIKELLDEHDPLLKKELEAKVGVLAINMSLSIAATVASIVGIGAEVTIFLLPIAGISAGIPSLVNNELILHDKATSVVNYFNHLSESKKYGPLKTEDDKILVPIDDLVISEIDFNNNSIKLGTCNILAMEGGSGHTVTGNIDHFFSSPSISSHIPSLSIYSAIGIETENLDFSKKIMMLPNAPSRVFWWETGAVPGLRSLENDGTRLLDSIRDLYPGKFYWRFYAFFDYAITTLKPVYEDTNIKIKLDKDTRNFIMPTITTNEIRNKLSYSFDGAGGTYSLLLSSYPISTNINLSKDDLWIFNIDNEVREISIENGTIKKGKLIKDVLSKIDINKNKLIIGNQTIDFSGDIDNKDRYIFLTCELDDKISLIIEINLVAKSYSLLLSGDKNYLISNLSNIIEKINTLGLDSKNIAYNYTDESNNKYFGAISKTSQKSIIHYKKDSKNILEFYNDSTLEFNSKDFIAEDINVFMKDDINTITGKYYVDNNTDKSIDFSISLVSKNQVKVNGLYLNESVYSSYLDFVKNSDGHHNTSNFMNLFLDNISFWKLFGFENINFVIDKYFTLVGKTNLGYVEFICDNNKNIDIYFGEWKTSSSKSTIFSGNGRNVVVEPIYNPDTGEDISTSLDFSYEPLYGIDRYINKVLIAPDLYTSLININTNYYSNEYYPEIIVLNPNTFHKKVNINLDSSSFEYKWSTEGSDFILVRYLEESNKKILQKIRIKGILSNTQSFNKMSIDFKDIKKLSLGYIMSNFKSFNSENELDRDHLGFKIIDNKTYYYDEDSKLVKGLININNSLFYFDPIEFNLVTGWQTINGKKYYFDINTGAALISYKIINGKHFYFNNDGVMQLGVFKGPDGFEYFAPANTQNNNIEGQAIVYQSKFLTLNGKKYYFDNDSKAVTGWRIINNEKYYFNPNNAIAAVGLQVIDNNKYYFNPDTAIISKGWQTVNGSRYYFDTDTAIAFNGYKTIDGKHFYFDSDCVVKIGVFSTSNGFEYFAPANTYNNNIEGQAIVYQSKFLTLNGKKYYFDNNSKAVTGWQTIDSKKYYFNTNTAEAATGWQTIDGKKYYFNTNTAEAATGWQTIDGKKYYFNTNTAIASTGYTIINGKHFYFNTDGIMQIGVFKGPNGFEYFAPANTDANNIEGQAILYQNEFLTLNGKKYYFGSDSKAVTGWRIINNKKYYFNPNNAIAAIHLCTINNDKYYFSYDGILQNGYITIERNNFYFDANNESKMVTGVFKGPNGFEYFAPANTHNNNIEGQAIVYQNKFLTLNGKKYYFDNDSKAVTGWQTIDGKKYYFNLNTAEAATGWQTIDGKKYYFNLNTAEAATGWQTIDGKKYYFNTNTFIASTGYTSINGKHFYFNTDGIMQIGVFKGPNGFEYFAPANTHNNNIEGQAILYQNKFLTLNGKKYYFGSDSKAVTGLRTIDGKKYYFNTNTAVAVTGWQTINGKKYYFNTNTSIASTGYTIISGKHFYFNTDGIMQIGVFKGPDGFEYFAPANTDANNIEGQAIRYQNRFLYLHDNIYYFGNNSKAATGWVTIDGNRYYFEPNTAMGANGYKTIDNKNFYFRNGLPQIGVFKGSNGFEYFAPANTDANNIEGQAIRYQNRFLHLLGKIYYFGNNSKAVTGWQTINGKVYYFMPDTAMAAAGGLFEIDGVIYFFGVDGVKAPGIYG

SEQ ID NO: 35 - protein, 2366 aa, synthetic construct
  REGION 1..2366: note = Synthetic amino acid sequence: mutant C. difficile TcdB
  SITE 102: note = MISC_FEATURE - Xaa is any amino acid.
  SITE 270: note = MISC_FEATURE - Xaa is any amino acid.
  SITE 273: note = MISC_FEATURE - Xaa is any amino acid.
  SITE 286: note = MISC_FEATURE - Xaa is any amino acid.
  SITE 288: note = MISC_FEATURE - Xaa is any amino acid.
  SITE 384: note = MISC_FEATURE - Xaa is any amino acid.
  SITE 520: note = MISC_FEATURE - Xaa is any amino acid.
  SITE 543: note = MISC_FEATURE - Xaa is any amino acid.
  SITE 544: note = MISC_FEATURE - Xaa is any amino acid.
  SITE 587: note = MISC_FEATURE - Xaa is any amino acid.
  SITE 600: note = MISC_FEATURE - Xaa is any amino acid.
  SITE 653: note = MISC_FEATURE - Xaa is any amino acid.
  SITE 698: note = MISC_FEATURE - Xaa is any amino acid.
  SITE 751: note = MISC_FEATURE - Xaa is any amino acid.
MSLVNRKQLEKMANVRFRTQEDEYVAILDALEEYHNMSENTVVEKYLKLKDINSLTDIYIDTYKKSGRNKALKKFKEYLVTEVLELKNNNLTPVEKNLHFVXIGGQINDTAINYINQWKDVNSDYNVNVFYDSNAFLINTLKKTVVESAINDTLESFRENLNDPRFDYNKFFRKRMEIIYDKQKNFINYYKAQREENPELIIDDIVKTYLSNEYSKEIDELNTYIEESLNKITQNSGNDVRNFEEFKNGESFNLYEQELVERWNLAAASXILXISALKEIGGMYLXVXMLPGIQPDLFESIEKPSSVTVDFWEMTKLEAIMKYKEYIPEYTSEHFDMLDEEVQSSFESVLASKSDKSEIFSSLGDMEASPLEVKIAFNSKGIIXQGLISVKDSYCSNLIVKQIENRYKILNNSLNPAISEDNDFNTTTNTFIDSIMAEANADNGRFMMELGKYLRVGFFPAVATTINLSGPEAYAAAYQDLLMFKEGSMNIHLIEADLRNFEISKTNISQSTEQEMASLXSFDDARAKAQFEEYKRNYFEGSXXEDDNLDFSQNIVVDKEYLLEKISSLARSSERGYIHYIVQLQGXKISYEAACNLFAXTPYDSVLFQKNIEDSEIAYYYNPGDGEIQEIDKYKIPSIISDRPKIKLTFIGXGKDEFNTDIFAGFDVDSLSTEIEAAIDLAKEDISPKSIEINLLGXNMFSYSINVEETYPGKLLLKVKDKISELMPSISQDSIIVSANQYEVRINSEGXRELLDHSGEWINKEESIIKDISSKEYISFNPKENKITVKSKNLPELSTLLQEIRNNSNSSDIELEEKVMLTECEINVISNIDTQIVEERIEEAKNLTSDSINYIKDEFKLIESISDALCDLKQQNELEDSHFISFEDISETDEGFSIRFINKETGESIFVETEKTIFSEYANHITEEISKIKGTIFDTVNGKLVKKVNLDTTHEVNTLNAAFFIQSLIEYNSSKESLSNLSVAMKVQVYAQLFSTGLNTITDAAKVVELVSTALDETIDLLPTLSEGLPIIATIIDGVSLGAAIKELSETSDPLLRQEIEAKIGIMAVNLTTATTAIITSSLGIASGFSILLVPLAGISAGIPSLVNNELVLRDKATKVVDYFKHVSLVETEGVFTLLDDKIMMPQDDLVISEIDFNNNSIVLGKCEIWRMEGGSGHTVTDDIDHFFSAPSITYREPHLSIYDVLEVQKEELDLSKDLMVLPNAPNRVFAWETGWTPGLRSLENDGTKLLDRIRDNYEGEFYWRYFAFIADALITTLKPRYEDTNIRINLDSNTRSFIVPIITTEYIREKLSYSFYGSGGTYALSLSQYNMGINIELSESDVWIIDVDNVVRDVTIESDKIKKGDLIEGILSTLSIEENKIILNSHEINFSGEVNGSNGFVSLTFSILEGINAIIEVDLLSKSYKLLISGELKILMLNSNHIQQKIDYIGFNSELQKNIPYSFVDSEGKENGFINGSTKEGLFVSELPDVVLISKVYMDDSKPSFGYYSNNLKDVKVITKDNVNILTGYYLKDDIKISLSLTLQDEKTIKLNSVHLDESGVAEILKFMNRKGNTNTSDSLMSFLESMNIKSIFVNFLQSNIKFILDANFIISGTTSIGQFEFICDENDNIQPYFIKFNTLETNYTLYVGNRQNMIVEPNYDLDDSGDISSTVINFSQKYLYGIDSCVNKVVISPNIYTDEINITPVYETNNTYPEVIVLDANYINEKINVNINDLSIRYVWSNDGNDFILMSTSEENKVSQVKIRFVNVFKDKTLANKLSFNFSDKQDVPVSEIILSFTPSYYEDGLIGYDLGLVSLYNEKFYINNFGMMVSGLIYINDSLYYFKPPVNNLITGFVTVGDDKYYFNPINGGAASIGETIIDDKNYYFNQSGVLQTGVFSTEDGFKYFAPANTLDENLEGEAIDFTGKLIIDENIYYFDDNYRGAVEWKELDGEMHYFSPETGKAFKGLNQIGDYKYYFNSDGVMQKGFVSINDNKHYFDDSGVMKVGYTEIDGKHFYFAENGEMQIGVFNTEDGFKYFAHHNEDLGNEEGEEISYSGILNFNNKIYYFDDSFTAVVGWKDLEDGSKYYFDEDTAEAYIGLSLINDGQYYFNDDGIMQVGFVTINDKVFYFSDSGIIESGVQNIDDNYFYIDDNGIVQIGVFDTSDGYKYFAPANTVNDNIYGQAVEYSGLVRVGEDVYYFGETYTIETGWIYDMENESDKYYFNPETKKACKGINLIDDIKYYFDEKGIMRTGLISFENNNYYFNENGEMQFGYINIEDKMFYFGEDGVMQIGVFNTPDGFKYFAHQNTLDENFEGESINYTGWLDLDEKRYYFTDEYIAATGSVIIDGEEYYFDPDTAQLVISE

SEQ ID NO: 36 - protein, 146 aa, synthetic construct
  REGION 1..146: note = Synthetic amino acid sequence: variable light chain of A3-25 mAb IgE
MKLPVRLLVLMFWIPGSSSDVVMTHTPLSLPVSLGDQASMSCRSSQSLIHSNGNTYLHWYLQKPGQSPKLLISKVSNRFSGVPDRFSGSGSGTDFTLKISRVEAEDLGVYFCSQTTYFPYTFGGGTRLEIKRADAAPTVSIFPPSS

SEQ ID NO: 37 - protein, 189 aa, synthetic construct
  REGION 1..189: note = Synthetic amino acid sequence: variable heavy chain of A3-25 mAb IgE
MYLGLNCVFIVFLLKGVQSEVNLEESGGGLVQPGGSMKLSCVASGFTFTNYWMNWVRQSPEKGLEWIAEIRLKSHNYATHFAESVKGRFTISRDDSKSAVSLQMTNLTPEDTGIFYCTWDYYGNPAFVYWGQGTLVTVSAASIRNPQLYPLKPCKGTASMTLGCLVKDYFPGPVTVTWYSDSLNMSTVN

SEQ ID NO: 38 - protein, 16 aa, synthetic construct
  REGION 1..16: note = Synthetic amino acid sequence: CDR1 of the variable light chain of A3-25 mAb
RSSQSLIHSNGNTYLH

SEQ ID NO: 39 - protein, 7 aa, synthetic construct
  REGION 1..7: note = Synthetic amino acid sequence: CDR2 of the variable light chain of A3-25 mAb
KVSNRFS

SEQ ID NO: 40 - protein, 9 aa, synthetic construct
  REGION 1..9: note = Synthetic amino acid sequence: CDR3 of the variable light chain of A3-25 mAb
SQTTYFPYT

SEQ ID NO: 41 - protein, 10 aa, synthetic construct
  REGION 1..10: note = Synthetic amino acid sequence: CDR1 of the variable heavy chain of A3-25 mAb
GFTFTNYWMN

SEQ ID NO: 42 - protein, 19 aa, synthetic construct
  REGION 1..19: note = Synthetic amino acid sequence: CDR2 of the variable heavy chain of A3-25 mAb
EIRLKSHNYATHFAESVKG

SEQ ID NO: 43 - protein, 10 aa, synthetic construct
  REGION 1..10: note = Synthetic amino acid sequence: CDR3 of the variable heavy chain of A3-25 mAb
DYYGNPAFVY

SEQ ID NO: 44 - DNA, 8142 bp, synthetic construct
  misc_feature 1..8142: note = Synthetic nucleotide sequence: TcdA gene (D285A D287A mutations)
  source 1..8142: mol_type = other DNA
catatgtctttaatatctaaagaagagttaataaaactcgcatatagcattagaccaagagaaaatgagtataaaactatactaactaatttagacgaatataataagttaactacaaacaataatgaaaataaatatttacaattaaaaaaactaaatgaatcaattgatgtttttatgaataaatataaaacttcaagcagaaatagagcactctctaatctaaaaaaagatatattaaaagaagtaattcttattaaaaattccaatacaagccctgtagaaaaaaatttacattttgtatggataggtggagaagtcagtgatattgctcttgaatacataaaacaatgggctgatattaatgcagaatataatattaaactgtggtatgatagtgaagcattcttagtaaatacactaaaaaaggctatagttgaatcttctaccactgaagcattacagctactagaggaagagattcaaaatcctcaatttgataatatgaaattttacaaaaaaaggatggaatttatatatgatagacaaaaaaggtttataaattattataaatctcaaatcaataaacctacagtacctacaatagatgatattataaagtctcatctagtatctgaatataatagagatgaaactgtattagaatcatatagaacaaattctttgagaaaaataaatagtaatcatgggatagatatcagggctaatagtttgtttacagaacaagagttattaaatatttatagtcaggagttgttaaatcgtggaaatttagctgcagcatctgacatagtaagattattagccctaaaaaattttggcggagtatatttagcagttgcaatgcttccaggtattcactctgatttatttaaaacaatatctagacctagctctattggactagaccgttgggaaatgataaaattagaggctattatgaagtataaaaaatatataaataattatacatcagaaaactttgataaacttgatcaacaattaaaagataattttaaactcattatagaaagtaaaagtgaaaaatctgagatattttctaaattagaaaatttaaatgtatctgatcttgaaattaaaatagctttcgctttaggcagtgttataaatcaagccttgatatcaaaacaaggttcatatcttactaacctagtaatagaacaagtaaaaaatagatatcaatttttaaaccaacaccttaacccagccatagagtctgataataacttcacagatactactaaaatttttcatgattcattatttaattcagctaccgcagaaaactctatgtttttaacaaaaatagcaccatacttacaagtaggttttatgccagaagctcgctccacaataagtttaagtggtccaggagcttatgcgtcagcttactatgatttcataaatttacaagaaaatactatagaaaaaactttaaaagcatcagatttaatagaatttaaattcccagaaaataatctatctcaattgacagaacaagaaataaatagtctatggagctttgatcaagcaagtgcaaaatatcaatttgagaaatatgtaagagattatactggtggatctctttctgaagacaatggggtagactttaataaaaatactgccctcgacaaaaactatttattaaataataaaattccatcaaacaatgtagaagaagctggaagtaaaaattatgttcattatatcatacagttacaaggagatgatataagttatgaagcaacatgcaatttattttctaaaaatcctaaaaatagtattattatacaacgaaatatgaatgaaagtgcaaaaagctactttttaagtgatgatggagaatctattttagaattaaataaatataggatacctgaaagattaaaaaataaggaaaaagtaaaagtaacctttattggacatggtaaagatgaattcaacacaagcgaatttgctagattaagtgtagattcactttccaatgagataagttcatttttagataccataaaattagatatatcacctaaaaatgtagaagtaaacttacttggatgtaatatgtttagttatgattttaatgttgaagaaacttatcctgggaagttgctattaagtattatggacaaaattacttccactttacctgatgtaaataaaaattctattactataggagcaaatcaatatgaagtaagaattaatagtgagggaagaaaagaacttctggctcactcaggtaaatggataaataaagaagaagctattatgagcgatttatctagtaaagaatacattttttttgattctatagataataagctaaaagcaaagtccaagaatattccaggattagcatcaatatcagaagatataaaaacattattacttgatgcaagtgttagtcctgatacaaaatttattttaaataatcttaagcttaatattgaatcttctattggtgattacatttattatgaaaaattagagcctgttaaaaatataattcacaattctatagatgatttaatagatgagttcaatctacttgaaaatgtatctgatgaattatatgaattaaaaaaattaaataatctagatgagaagtatttaatatcttttgaagatatctcaaaaaataattcaacttactctgtaagatttattaacaaaagtaatggtgagtcagtttatgtagaaacagaaaaagaaattttttcaaaatatagcgaacatattacaaaagaaataagtactataaagaatagtataattacagatgttaatggtaatttattggataatatacagttagatcatacttctcaagttaatacattaaacgcagcattctttattcaatcattaatagattatagtagcaataaagatgtactgaatgatttaagtacctcagttaaggttcaactttatgctcaactatttagtacaggtttaaatactatatatgactctatccaattagtaaatttaatatcaaatgcagtaaatgatactataaatgtactacctacaataacagaggggatacctattgtatctactatattagacggaataaacttaggtgcagcaattaaggaattactagacgaacatgacccattactaaaaaaagaattagaagctaaggtgggtgttttagcaataaatatgtcattatctatagctgcaactgtagcttcaattgttggaataggtgctgaagttactattttcttattacctatagctggtatatctgcaggaataccttcattagttaataatgaattaatattgcatgataaggcaacttcagtggtaaactattttaatcatttgtctgaatctaaaaaatatggccctcttaaaacagaagatgataaaattttagttcctattgatgatttagtaatatcagaaatagattttaataataattcgataaaactaggaacatgtaatatattagcaatggaggggggatcaggacacacagtgactggtaatatagatcactttttctcatctccatctataagttctcatattccttcattatcaatttattctgcaataggtatagaaacagaaaatctagatttttcaaaaaaaataatgatgttacctaatgctccttcaagagtgttttggtgggaaactggagcagttccaggtttaagatcattggaaaatgacggaactagattacttgattcaataagagatttatacccaggtaaattttactggagattctatgcttttttcgattatgcaataactacattaaaaccagtttatgaagacactaatattaaaattaaactagataaagatactagaaacttcataatgccaactataactactaacgaaattagaaacaaattatcttattcatttgatggagcaggaggaacttactctttattattatcttcatatccaatatcaacgaatataaatttatctaaagatgatttatggatatttaatattgataatgaagtaagagaaatatctatagaaaatggtactattaaaaaaggaaagttaataaaagatgttttaagtaaaattgatataaataaaaataaacttattataggcaatcaaacaatagatttttcaggcgatatagataataaagatagatatatattcttgacttgtgagttagatgataaaattagtttaataatagaaataaatcttgttgcaaaatcttatagtttgttattgtctggggataaaaattatttgatatccaatttatctaatattattgagaaaatcaatactttaggactagatagtaaaaatatagcgtacaattacactgatgaatctaataataaatattttggagctatatctaaaacaagtcaaaaaagcataatacattataaaaaagacagtaaaaatatattagaattttataatgacagtacattagaatttaacagtaaagattttattgctgaagatataaatgtatttatgaaagatgatattaatactataacaggaaaatactatgttgataataatactgataaaagtatagatttctctatttctttagttagtaaaaatcaagtaaaagtaaatggattatatttaaatgaatccgtatactcatcttaccttgattttgtgaaaaattcagatggacaccataatacttctaattttatgaatttatttttggacaatataagtttctggaaattgtttgggtttgaaaatataaattttgtaatcgataaatactttacccttgttggtaaaactaatcttggatatgtagaatttatttgtgacaataataaaaatatagatatatattttggtgaatggaaaacatcgtcatctaaaagcactatatttagcggaaatggtagaaatgttgtagtagagcctatatataatcctgatacgggtgaagatatatctacttcactagatttttcctatgaacctctctatggaatagatagatatatcaataaagtattgatagcacctgatttatatacaagtttaataaatattaataccaattattattcaaatgagtactaccctgagattatagttcttaacccaaatacattccacaaaaaagtaaatataaatttagatagttcttcttttgagtataaatggtctacagaaggaagtgactttattttagttagatacttagaagaaagtaataaaaaaatattacaaaaaataagaatcaaaggtatcttatctaatactcaatcatttaataaaatgagtatagattttaaagatattaaaaaactatcattaggatatataatgagtaattttaaatcatttaattctgaaaatgaattagatagagatcatttaggatttaaaataatagataataaaacttattactatgatgaagatagtaaattagttaaaggattaatcaatataaataattcattattctattttgatcctatagaatttaacttagtaactggatggcaaactatcaatggtaaaaaatattattttgatataaatactggagcagctttaattagttataaaattattaatggtaaacacttttattttaataatgatggtgtgatgcagttgggagtatttaaaggacctgatggatttgaatattttgcacctgccaatactcaaaataataacatagaaggtcaggctatagtttatcaaagtaaattcttaactttgaatggcaaaaaatattattttgataatgactcaaaagcagtcactggatggagaattattaacaatgagaaatattactttaatcctaataatgctattgctgcagtcggattgcaagtaattgacaataataagtattatttcaatcctgacactgctatcatctcaaaaggttggcagactgttaatggtagtagatactactttgatactgataccgctattgcctttaatggttataaaactattgatggtaaacacttttattttgatagtgattgtgtagtgaaaataggtgtgtttagtacctctaatggatttgaatattttgcacctgctaatacttataataataacatagaaggtcaggctatagtttatcaaagtaaattcttaactttgaatggtaaaaaatattactttgataataactcaaaagcagttaccggatggcaaactattgatagtaaaaaatattactttaatactaacactgctgaagcagctactggatggcaaactattgatggtaaaaaatattactttaatactaacactgctgaagcagctactggatggcaaactattgatggtaaaaaatattactttaatactaacactgctatagcttcaactggttatacaattattaatggtaaacatttttattttaatactgatggtattatgcagataggagtgtttaaaggacctaatggatttgaatattttgcacctgctaatacggatgctaacaacatagaaggtcaagctatactttaccaaaatgaattcttaactttgaatggtaaaaaatattactttggtagtgactcaaaagcagttactggatggagaattattaacaataagaaatattactttaatcctaataatgctattgctgcaattcatctatgcactataaataatgacaagtattactttagttatgatggaattcttcaaaatggatatattactattgaaagaaataatttctattttgatgctaataatgaatctaaaatggtaacaggagtatttaaaggacctaatggatttgagtattttgcacctgctaatactcacaataataacatagaaggtcaggctatagtttaccagaacaaattcttaactttgaatggcaaaaaatattattttgataatgactcaaaagcagttactggatggcaaaccattgatggtaaaaaatattactttaatcttaacactgctgaagcagctactggatggcaaactattgatggtaaaaaatattactttaatcttaacactgctgaagcagctactggatggcaaactattgatggtaaaaaatattactttaatactaacactttcatagcctcaactggttatacaagtattaatggtaaacatttttattttaatactgatggtattatgcagataggagtgtttaaaggacctaatggatttgaatactttgcacctgctaatactcataataataacatagaaggtcaagctatactttaccaaaataaattcttaactttgaatggtaaaaaatattactttggtagtgactcaaaagcagttaccggattgcgaactattgatggtaaaaaatattactttaatactaacactgctgttgcagttactggatggcaaactattaatggtaaaaaatactactttaatactaacacttctatagcttcaactggttatacaattattagtggtaaacatttttattttaatactgatggtattatgcagataggagtgtttaaaggacctgatggatttgaatactttgcacctgctaatacagatgctaacaatatagaaggtcaagctatacgttatcaaaatagattcctatatttacatgacaatatatattattttggtaataattcaaaagcagctactggttgggtaactattgatggtaatagatattacttcgagcctaatacagctatgggtgcgaatggttataaaactattgataataaaaatttttactttagaaatggtttacctcagataggagtgtttaaagggtctaatggatttgaatactttgcacctgctaatacggatgctaacaatatagaaggtcaagctatacgttatcaaaatagattcctacatttacttggaaaaatatattactttggtaataattcaaaagcagttactggatggcaaactattaatggtaaagtatattactttatgcctgatactgctatggctgcagcaggtggacttttcgagattgatggtgttatatatttctttggtgttgatggagtaaaagcccctgggatatatggctaaagatct

SEQ ID NO: 45 - DNA, 8136 bp, synthetic construct
  misc_feature 1..8136: note = Synthetic nucleotide sequence: TcdA gene (D285A D287A C700A mutations)
  source 1..8136: mol_type = other DNA
catatgtctttaatatctaaagaagagttaataaaactcgcatatagcattagaccaagagaaaatgagtataaaactatactaactaatttagacgaatataataagttaactacaaacaataatgaaaataaatatttacaattaaaaaaactaaatgaatcaattgatgtttttatgaataaatataaaacttcaagcagaaatagagcactctctaatctaaaaaaagatatattaaaagaagtaattcttattaaaaattccaatacaagccctgtagaaaaaaatttacattttgtatggataggtggagaagtcagtgatattgctcttgaatacataaaacaatgggctgatattaatgcagaatataatattaaactgtggtatgatagtgaagcattcttagtaaatacactaaaaaaggctatagttgaatcttctaccactgaagcattacagctactagaggaagagattcaaaatcctcaatttgataatatgaaattttacaaaaaaaggatggaatttatatatgatagacaaaaaaggtttataaattattataaatctcaaatcaataaacctacagtacctacaatagatgatattataaagtctcatctagtatctgaatataatagagatgaaactgtattagaatcatatagaacaaattctttgagaaaaataaatagtaatcatgggatagatatcagggctaatagtttgtttacagaacaagagttattaaatatttatagtcaggagttgttaaatcgtggaaatttagctgcagcatctgacatagtaagattattagccctaaaaaattttggcggagtatatttagcagttgcaatgcttccaggtattcactctgatttatttaaaacaatatctagacctagctctattggactagaccgttgggaaatgataaaattagaggctattatgaagtataaaaaatatataaataattatacatcagaaaactttgataaacttgatcaacaattaaaagataattttaaactcattatagaaagtaaaagtgaaaaatctgagatattttctaaattagaaaatttaaatgtatctgatcttgaaattaaaatagctttcgctttaggcagtgttataaatcaagccttgatatcaaaacaaggttcatatcttactaacctagtaatagaacaagtaaaaaatagatatcaatttttaaaccaacaccttaacccagccatagagtctgataataacttcacagatactactaaaatttttcatgattcattatttaattcagctaccgcagaaaactctatgtttttaacaaaaatagcaccatacttacaagtaggttttatgccagaagctcgctccacaataagtttaagtggtccaggagcttatgcgtcagcttactatgatttcataaatttacaagaaaatactatagaaaaaactttaaaagcatcagatttaatagaatttaaattcccagaaaataatctatctcaattgacagaacaagaaataaatagtctatggagctttgatcaagcaagtgcaaaatatcaatttgagaaatatgtaagagattatactggtggatctctttctgaagacaatggggtagactttaataaaaatactgccctcgacaaaaactatttattaaataataaaattccatcaaacaatgtagaagaagctggaagtaaaaattatgttcattatatcatacagttacaaggagatgatataagttatgaagcaacatgcaatttattttctaaaaatcctaaaaatagtattattatacaacgaaatatgaatgaaagtgcaaaaagctactttttaagtgatgatggagaatctattttagaattaaataaatataggatacctgaaagattaaaaaataaggaaaaagtaaaagtaacctttattggacatggtaaagatgaattcaacacaagcgaatttgctagattaagtgtagattcactttccaatgagataagttcatttttagataccataaaattagatatatcacctaaaaatgtagaagtaaacttacttggagctaatatgtttagttatgattttaatgttgaagaaacttatcctgggaagttgctattaagtattatggacaaaattacttccactttacctgatgtaaataaaaattctattactataggagcaaatcaatatgaagtaagaattaatagtgagggaagaaaagaacttctggctcactcaggtaaatggataaataaagaagaagctattatgagcgatttatctagtaaagaatacattttttttgattctatagataataagctaaaagcaaagtccaagaatattccaggattagcatcaatatcagaagatataaaaacattattacttgatgcaagtgttagtcctgatacaaaatttattttaaataatcttaagcttaatattgaatcttctattggtgattacatttattatgaaaaattagagcctgttaaaaatataattcacaattctatagatgatttaatagatgagttcaatctacttgaaaatgtatctgatgaattatatgaattaaaaaaattaaataatctagatgagaagtatttaatatcttttgaagatatctcaaaaaataattcaacttactctgtaagatttattaacaaaagtaatggtgagtcagtttatgtagaaacagaaaaagaaattttttcaaaatatagcgaacatattacaaaagaaataagtactataaagaatagtataattacagatgttaatggtaatttattggataatatacagttagatcatacttctcaagttaatacattaaacgcagcattctttattcaatcattaatagattatagtagcaataaagatgtactgaatgatttaagtacctcagttaaggttcaactttatgctcaactatttagtacaggtttaaatactatatatgactctatccaattagtaaatttaatatcaaatgcagtaaatgatactataaatgtactacctacaataacagaggggatacctattgtatctactatattagacggaataaacttaggtgcagcaattaaggaattactagacgaacatgacccattactaaaaaaagaattagaagctaaggtgggtgttttagcaataaatatgtcattatctatagctgcaactgtagcttcaattgttggaataggtgctgaagttactattttcttattacctatagctggtatatctgcaggaataccttcattagttaataatgaattaatattgcatgataaggcaacttcagtggtaaactattttaatcatttgtctgaatctaaaaaatatggccctcttaaaacagaagatgataaaattttagttcctattgatgatttagtaatatcagaaatagattttaataataattcgataaaactaggaacatgtaatatattagcaatggaggggggatcaggacacacagtgactggtaatatagatcactttttctcatctccatctataagttctcatattccttcattatcaatttattctgcaataggtatagaaacagaaaatctagatttttcaaaaaaaataatgatgttacctaatgctccttcaagagtgttttggtgggaaactggagcagttccaggtttaagatcattggaaaatgacggaactagattacttgattcaataagagatttatacccaggtaaattttactggagattctatgcttttttcgattatgcaataactacattaaaaccagtttatgaagacactaatattaaaattaaactagataaagatactagaaacttcataatgccaactataactactaacgaaattagaaacaaattatcttattcatttgatggagcaggaggaacttactctttattattatcttcatatccaatatcaacgaatataaatttatctaaagatgatttatggatatttaatattgataatgaagtaagagaaatatctatagaaaatggtactattaaaaaaggaaagttaataaaagatgttttaagtaaaattgatataaataaaaataaacttattataggcaatcaaacaatagatttttcaggcgatatagataataaagatagatatatattcttgacttgtgagttagatgataaaattagtttaataatagaaataaatcttgttgcaaaatcttatagtttgttattgtctggggataaaaattatttgatatccaatttatctaatattattgagaaaatcaatactttaggactagatagtaaaaatatagcgtacaattacactgatgaatctaataataaatattttggagctatatctaaaacaagtcaaaaaagcataatacattataaaaaagacagtaaaaatatattagaattttataatgacagtacattagaatttaacagtaaagattttattgctgaagatataaatgtatttatgaaagatgatattaatactataacaggaaaatactatgttgataataatactgataaaagtatagatttctctatttctttagttagtaaaaatcaagtaaaagtaaatggattatatttaaatgaatccgtatactcatcttaccttgattttgtgaaaaattcagatggacaccataatacttctaattttatgaatttatttttggacaatataagtttctggaaattgtttgggtttgaaaatataaattttgtaatcgataaatactttacccttgttggtaaaactaatcttggatatgtagaatttatttgtgacaataataaaaatatagatatatattttggtgaatggaaaacatcgtcatctaaaagcactatatttagcggaaatggtagaaatgttgtagtagagcctatatataatcctgatacgggtgaagatatatctacttcactagatttttcctatgaacctctctatggaatagatagatatatcaataaagtattgatagcacctgatttatatacaagtttaataaatattaataccaattattattcaaatgagtactaccctgagattatagttcttaacccaaatacattccacaaaaaagtaaatataaatttagatagttcttcttttgagtataaatggtctacagaaggaagtgactttattttagttagatacttagaagaaagtaataaaaaaatattacaaaaaataagaatcaaaggtatcttatctaatactcaatcatttaataaaatgagtatagattttaaagatattaaaaaactatcattaggatatataatgagtaattttaaatcatttaattctgaaaatgaattagatagagatcatttaggatttaaaataatagataataaaacttattactatgatgaagatagtaaattagttaaaggattaatcaatataaataattcattattctattttgatcctatagaatttaacttagtaactggatggcaaactatcaatggtaaaaaatattattttgatataaatactggagcagctttaattagttataaaattattaatggtaaacacttttattttaataatgatggtgtgatgcagttgggagtatttaaaggacctgatggatttgaatattttgcacctgccaatactcaaaataataacatagaaggtcaggctatagtttatcaaagtaaattcttaactttgaatggcaaaaaatattattttgataatgactcaaaagcagtcactggatggagaattattaacaatgagaaatattactttaatcctaataatgctattgctgcagtcggattgcaagtaattgacaataataagtattatttcaatcctgacactgctatcatctcaaaaggttggcagactgttaatggtagtagatactactttgatactgataccgctattgcctttaatggttataaaactattgatggtaaacacttttattttgatagtgattgtgtagtgaaaataggtgtgtttagtacctctaatggatttgaatattttgcacctgctaatacttataataataacatagaaggtcaggctatagtttatcaaagtaaattcttaactttgaatggtaaaaaatattactttgataataactcaaaagcagttaccggatggcaaactattgatagtaaaaaatattactttaatactaacactgctgaagcagctactggatggcaaactattgatggtaaaaaatattactttaatactaacactgctgaagcagctactggatggcaaactattgatggtaaaaaatattactttaatactaacactgctatagcttcaactggttatacaattattaatggtaaacatttttattttaatactgatggtattatgcagataggagtgtttaaaggacctaatggatttgaatattttgcacctgctaatacggatgctaacaacatagaaggtcaagctatactttaccaaaatgaattcttaactttgaatggtaaaaaatattactttggtagtgactcaaaagcagttactggatggagaattattaacaataagaaatattactttaatcctaataatgctattgctgcaattcatctatgcactataaataatgacaagtattactttagttatgatggaattcttcaaaatggatatattactattgaaagaaataatttctattttgatgctaataatgaatctaaaatggtaacaggagtatttaaaggacctaatggatttgagtattttgcacctgctaatactcacaataataacatagaaggtcaggctatagtttaccagaacaaattcttaactttgaatggcaaaaaatattattttgataatgactcaaaagcagttactggatggcaaaccattgatggtaaaaaatattactttaatcttaacactgctgaagcagctactggatggcaaactattgatggtaaaaaatattactttaatcttaacactgctgaagcagctactggatggcaaactattgatggtaaaaaatattactttaatactaacactttcatagcctcaactggttatacaagtattaatggtaaacatttttattttaatactgatggtattatgcagataggagtgtttaaaggacctaatggatttgaatactttgcacctgctaatactcataataataacatagaaggtcaagctatactttaccaaaataaattcttaactttgaatggtaaaaaatattactttggtagtgactcaaaagcagttaccggattgcgaactattgatggtaaaaaatattactttaatactaacactgctgttgcagttactggatggcaaactattaatggtaaaaaatactactttaatactaacacttctatagcttcaactggttatacaattattagtggtaaacatttttattttaatactgatggtattatgcagataggagtgtttaaaggacctgatggatttgaatactttgcacctgctaatacagatgctaacaatatagaaggtcaagctatacgttatcaaaatagattcctatatttacatgacaatatatattattttggtaataattcaaaagcagctactggttgggtaactattgatggtaatagatattacttcgagcctaatacagctatgggtgcgaatggttataaaactattgataataaaaatttttactttagaaatggtttacctcagataggagtgtttaaagggtctaatggatttgaatactttgcacctgctaatacggatgctaacaatatagaaggtcaagctatacgttatcaaaatagattcctacatttacttggaaaaatatattactttggtaataattcaaaagcagttactggatggcaaactattaatggtaaagtatattactttatgcctgatactgctatggctgcagcaggtggacttttcgagattgatggtgttatatatttctttggtgttgatggagtaaaagcccctgggatatatggctaa

SEQ ID NO: 46 - DNA, 7110 bp, synthetic construct
  misc_feature 1..7110: note = Synthetic nucleotide sequence: TcdB (D286A D288A mutations)
  source 1..7110: mol_type = other DNA
catatgagtttagttaatagaaaacagttagaaaaaatggcaaatgtaagatttcgtactcaagaagatgaatatgttgcaatattggatgctttagaagaatatcataatatgtcagagaatactgtagtcgaaaaatatttaaaattaaaagatataaatagtttaacagatatttatatagatacatataaaaaatctggtagaaataaagccttaaaaaaatttaaggaatatctagttacagaagtattagagctaaagaataataatttaactccagttgagaaaaatttacattttgtttggattggaggtcaaataaatgacactgctattaattatataaatcaatggaaagatgtaaatagtgattataatgttaatgttttttatgatagtaatgcatttttgataaacacattgaaaaaaactgtagtagaatcagcaataaatgatacacttgaatcatttagagaaaacttaaatgaccctagatttgactataataaattcttcagaaaacgtatggaaataatttatgataaacagaaaaatttcataaactactataaagctcaaagagaagaaaatcctgaacttataattgatgatattgtaaagacatatctttcaaatgagtattcaaaggagatagatgaacttaatacctatattgaagaatccttaaataaaattacacagaatagtggaaatgatgttagaaactttgaagaatttaaaaatggagagtcattcaacttatatgaacaagagttggtagaaaggtggaatttagctgctgcttctgacatattaagaatatctgcattaaaagaaattggtggtatgtatttagcagttgcaatgttaccaggaatacaaccagacttatttgagtctatagagaaacctagttcagtaacagtggatttttgggaaatgacaaagttagaagctataatgaaatacaaagaatatataccagaatatacctcagaacattttgacatgttagacgaagaagttcaaagtagttttgaatctgttctagcttctaagtcagataaatcagaaatattctcatcacttggtgatatggaggcatcaccactagaagttaaaattgcatttaatagtaagggtattataaatcaagggctaatttctgtgaaagactcatattgtagcaatttaatagtaaaacaaatcgagaatagatataaaatattgaataatagtttaaatccagctattagcgaggataatgattttaatactacaacgaatacctttattgatagtataatggctgaagctaatgcagataatggtagatttatgatggaactaggaaagtatttaagagttggtttcttcccagatgttaaaactactattaacttaagtggccctgaagcttatgcggcagcttatcaagatttattaatgtttaaagaaggcagtatgaatatccatttgatagaagctgatttaagaaactttgaaatctctaaaactaatatttctcaatcaactgaacaagaaatggcttctttatggtcatttgacgatgcaagagctaaagctcaatttgaagaatataaaaggaattattttgaaggttctcttggtgaagatgataatcttgatttttctcaaaatatagtagttgacaaggagtatcttttagaaaaaatatcttcattagcaagaagttcagagagaggatatatacactatattgttcagttacaaggagataaaattagttatgaagcagcatgtaacttatttgcaaagactccttatgatagtgtactgtttcagaaaaatatagaagattcagaaattgcatattattataatcctggagatggtgaaatacaagaaatagacaagtataaaattccaagtataatttctgatagacctaagattaaattaacatttattggtcatggtaaagatgaatttaatactgatatatttgcaggttttgatgtagattcattatccacagaaatagaagcagcaatagatttagctaaagaggatatttctcctaagtcaatagaaataaatttattaggatgtaatatgtttagctactctatcaacgtagaggagacttatcctggaaaattattacttaaagttaaagataaaatatcagaattaatgccatctataagtcaagactctattatagtaagtgcaaatcaatatgaagttagaataaatagtgaaggaagaagagaattattggatcattctggtgaatggataaataaagaagaaagtattataaaggatatttcatcaaaagaatatatatcatttaatcctaaagaaaataaaattacagtaaaatctaaaaatttacctgagctatctacattattacaagaaattagaaataattctaattcaagtgatattgaactagaagaaaaagtaatgttaacagaatgtgagataaatgttatttcaaatatagatacgcaaattgttgaggaaaggattgaagaagctaagaatttaacttctgactctattaattatataaaagatgaatttaaactaatagaatctatttctgatgcactatgtgacttaaaacaacagaatgaattagaagattctcattttatatcttttgaggacatatcagagactgatgagggatttagtataagatttattaataaagaaactggagaatctatatttgtagaaactgaaaaaacaatattctctgaatatgctaatcatataactgaagagatttctaagataaaaggtactatatttgatactgtaaatggtaagttagtaaaaaaagtaaatttagatactacacacgaagtaaatactttaaatgctgcattttttatacaatcattaatagaatataatagttctaaagaatctcttagtaatttaagtgtagcaatgaaagtccaagtttacgctcaattatttagtactggtttaaatactattacagatgcagccaaagttgttgaattagtatcaactgcattagatgaaactatagacttacttcctacattatctgaaggattacctataattgcaactattatagatggtgtaagtttaggtgcagcaatcaaagagctaagtgaaacgagtgacccattattaagacaagaaatagaagctaagataggtataatggcagtaaatttaacaacagctacaactgcaatcattacttcatctttggggatagctagtggatttagtatacttttagttcctttagcaggaatttcagcaggtataccaagcttagtaaacaatgaacttgtacttcgagataaggcaacaaaggttgtagattattttaaacatgtttcattagttgaaactgaaggagtatttactttattagatgataaaataatgatgccacaagatgatttagtgatatcagaaatagattttaataataattcaatagttttaggtaaatgtgaaatctggagaatggaaggtggttcaggtcatactgtaactgatgatatagatcacttcttttcagcaccatcaataacatatagagagccacacttatctatatatgacgtattggaagtacaaaaagaagaacttgatttgtcaaaagatttaatggtattacctaatgctccaaatagagtatttgcttgggaaacaggatggacaccaggtttaagaagcttagaaaatgatggcacaaaactgttagaccgtataagagataactatgaaggtgagttttattggagatattttgcttttatagctgatgctttaataacaacattaaaaccaagatatgaagatactaatataagaataaatttagatagtaatactagaagttttatagttccaataataactacagaatatataagagaaaaattatcatattctttctatggttcaggaggaacttatgcattgtctctttctcaatataatatgggtataaatatagaattaagtgaaagtgatgtttggattatagatgttgataatgttgtgagagatgtaactatagaatctgataaaattaaaaaaggtgatttaatagaaggtattttatctacactaagtattgaagagaataaaattatcttaaatagccatgagattaatttttctggtgaggtaaatggaagtaatggatttgtttctttaacattttcaattttagaaggaataaatgcaattatagaagttgatttattatctaaatcatataaattacttatttctggcgaattaaaaatattgatgttaaattcaaatcatattcaacagaaaatagattatataggattcaatagcgaattacagaaaaatataccatatagctttgtagatagtgaaggaaaagagaatggttttattaatggttcaacaaaagaaggtttatttgtatctgaattacctgatgtagttcttataagtaaggtttatatggatgatagtaagccttcatttggatattatagtaataatttgaaagatgtcaaagttataactaaagataatgttaatatattaacaggttattatcttaaggatgatataaaaatctctctttctttgactctacaagatgaaaaaactataaagttaaatagtgtgcatttagatgaaagtggagtagctgagattttgaagttcatgaatagaaaaggtaatacaaatacttcagattctttaatgagctttttagaaagtatgaatataaaaagtattttcgttaatttcttacaatctaatattaagtttatattagatgctaattttataataagtggtactacttctattggccaatttgagtttatttgtgatgaaaatgataatatacaaccatatttcattaagtttaatacactagaaactaattatactttatatgtaggaaatagacaaaatatgatagtggaaccaaattatgatttagatgattctggagatatatcttcaactgttatcaatttctctcaaaagtatctttatggaatagacagttgtgttaataaagttgtaatttcaccaaatatttatacagatgaaataaatataacgcctgtatatgaaacaaataatacttatccagaagttattgtattagatgcaaattatataaatgaaaaaataaatgttaatatcaatgatctatctatacgatatgtatggagtaatgatggtaatgattttattcttatgtcaactagtgaagaaaataaggtgtcacaagttaaaataagattcgttaatgtttttaaagataagactttggcaaataagctatcttttaactttagtgataaacaagatgtacctgtaagtgaaataatcttatcatttacaccttcatattatgaggatggattgattggctatgatttgggtctagtttctttatataatgagaaattttatattaataactttggaatgatggtatctggattaatatatattaatgattcattatattattttaaaccaccagtaaataatttgataactggatttgtgactgtaggcgatgataaatactactttaatccaattaatggtggagctgcttcaattggagagacaataattgatgacaaaaattattatttcaaccaaagtggagtgttacaaacaggtgtatttagtacagaagatggatttaaatattttgccccagctaatacacttgatgaaaacctagaaggagaagcaattgattttactggaaaattaattattgacgaaaatatttattattttgatgataattatagaggagctgtagaatggaaagaattagatggtgaaatgcactattttagcccagaaacaggtaaagcttttaaaggtctaaatcaaataggtgattataaatactatttcaattctgatggagttatgcaaaaaggatttgttagtataaatgataataaacactattttgatgattctggtgttatgaaagtaggttacactgaaatagatggcaagcatttctactttgctgaaaacggagaaatgcaaataggagtatttaatacagaagatggatttaaatattttgctcatcataatgaagatttaggaaatgaagaaggtgaagaaatctcatattctggtatattaaatttcaataataaaatttactattttgatgattcatttactgctgtagttggatggaaagatttagaggatggttcaaagtattattttgatgaagatacagcagaagcatatataggtttgtcattaataaatgatggtcaatattattttaatgatgatggaattatgcaagttggatttgtcactataaatgataaagtcttctacttctctgactctggaattatagaatctggagtacaaaacatagatgacaattatttctatatagatgataatggtatagttcaaattggtgtatttgatacttcagatggatataaatattttgcacctgctaatactgtaaatgataatatttacggacaagcagttgaatatagtggtttagttagagttggtgaagatgtatattattttggagaaacatatacaattgagactggatggatatatgatatggaaaatgaaagtgataaatattatttcaatccagaaactaaaaaagcatgcaaaggtattaatttaattgatgatataaaatattattttgatgagaagggcataatgagaacgggtcttatatcatttgaaaataataattattactttaatgagaatggtgaaatgcaatttggttatataaatatagaagataagatgttctattttggtgaagatggtgtcatgcagattggagtatttaatacaccagatggatttaaatactttgcacatcaaaatactttggatgagaattttgagggagaatcaataaactatactggttggttagatttagatgaaaagagatattattttacagatgaatatattgcagcaactggttcagttattattgatggtgaggagtattattttgatcctgatacagctcaattagtgattagtgaatagagatct

SEQ ID NO: 47 - DNA, 7104 bp, synthetic construct
  misc_feature 1..7104: note = Synthetic nucleotide sequence: TcdB (D286A D288A C698A mutations)
  source 1..7104: mol_type = other DNA
catatgagtttagttaatagaaaacagttagaaaaaatggcaaatgtaagatttcgtactcaagaagatgaatatgttgcaatattggatgctttagaagaatatcataatatgtcagagaatactgtagtcgaaaaatatttaaaattaaaagatataaatagtttaacagatatttatatagatacatataaaaaatctggtagaaataaagccttaaaaaaatttaaggaatatctagttacagaagtattagagctaaagaataataatttaactccagttgagaaaaatttacattttgtttggattggaggtcaaataaatgacactgctattaattatataaatcaatggaaagatgtaaatagtgattataatgttaatgttttttatgatagtaatgcatttttgataaacacattgaaaaaaactgtagtagaatcagcaataaatgatacacttgaatcatttagagaaaacttaaatgaccctagatttgactataataaattcttcagaaaacgtatggaaataatttatgataaacagaaaaatttcataaactactataaagctcaaagagaagaaaatcctgaacttataattgatgatattgtaaagacatatctttcaaatgagtattcaaaggagatagatgaacttaatacctatattgaagaatccttaaataaaattacacagaatagtggaaatgatgttagaaactttgaagaatttaaaaatggagagtcattcaacttatatgaacaagagttggtagaaaggtggaatttagctgctgcttctgacatattaagaatatctgcattaaaagaaattggtggtatgtatttagcagttgcaatgttaccaggaatacaaccagacttatttgagtctatagagaaacctagttcagtaacagtggatttttgggaaatgacaaagttagaagctataatgaaatacaaagaatatataccagaatatacctcagaacattttgacatgttagacgaagaagttcaaagtagttttgaatctgttctagcttctaagtcagataaatcagaaatattctcatcacttggtgatatggaggcatcaccactagaagttaaaattgcatttaatagtaagggtattataaatcaagggctaatttctgtgaaagactcatattgtagcaatttaatagtaaaacaaatcgagaatagatataaaatattgaataatagtttaaatccagctattagcgaggataatgattttaatactacaacgaatacctttattgatagtataatggctgaagctaatgcagataatggtagatttatgatggaactaggaaagtatttaagagttggtttcttcccagatgttaaaactactattaacttaagtggccctgaagcttatgcggcagcttatcaagatttattaatgtttaaagaaggcagtatgaatatccatttgatagaagctgatttaagaaactttgaaatctctaaaactaatatttctcaatcaactgaacaagaaatggcttctttatggtcatttgacgatgcaagagctaaagctcaatttgaagaatataaaaggaattattttgaaggttctcttggtgaagatgataatcttgatttttctcaaaatatagtagttgacaaggagtatcttttagaaaaaatatcttcattagcaagaagttcagagagaggatatatacactatattgttcagttacaaggagataaaattagttatgaagcagcatgtaacttatttgcaaagactccttatgatagtgtactgtttcagaaaaatatagaagattcagaaattgcatattattataatcctggagatggtgaaatacaagaaatagacaagtataaaattccaagtataatttctgatagacctaagattaaattaacatttattggtcatggtaaagatgaatttaatactgatatatttgcaggttttgatgtagattcattatccacagaaatagaagcagcaatagatttagctaaagaggatatttctcctaagtcaatagaaataaatttattaggagctaatatgtttagctactctatcaacgtagaggagacttatcctggaaaattattacttaaagttaaagataaaatatcagaattaatgccatctataagtcaagactctattatagtaagtgcaaatcaatatgaagttagaataaatagtgaaggaagaagagaattattggatcattctggtgaatggataaataaagaagaaagtattataaaggatatttcatcaaaagaatatatatcatttaatcctaaagaaaataaaattacagtaaaatctaaaaatttacctgagctatctacattattacaagaaattagaaataattctaattcaagtgatattgaactagaagaaaaagtaatgttaacagaatgtgagataaatgttatttcaaatatagatacgcaaattgttgaggaaaggattgaagaagctaagaatttaacttctgactctattaattatataaaagatgaatttaaactaatagaatctatttctgatgcactatgtgacttaaaacaacagaatgaattagaagattctcattttatatcttttgaggacatatcagagactgatgagggatttagtataagatttattaataaagaaactggagaatctatatttgtagaaactgaaaaaacaatattctctgaatatgctaatcatataactgaagagatttctaagataaaaggtactatatttgatactgtaaatggtaagttagtaaaaaaagtaaatttagatactacacacgaagtaaatactttaaatgctgcattttttatacaatcattaatagaatataatagttctaaagaatctcttagtaatttaagtgtagcaatgaaagtccaagtttacgctcaattatttagtactggtttaaatactattacagatgcagccaaagttgttgaattagtatcaactgcattagatgaaactatagacttacttcctacattatctgaaggattacctataattgcaactattatagatggtgtaagtttaggtgcagcaatcaaagagctaagtgaaacgagtgacccattattaagacaagaaatagaagctaagataggtataatggcagtaaatttaacaacagctacaactgcaatcattacttcatctttggggatagctagtggatttagtatacttttagttcctttagcaggaatttcagcaggtataccaagcttagtaaacaatgaacttgtacttcgagataaggcaacaaaggttgtagattattttaaacatgtttcattagttgaaactgaaggagtatttactttattagatgataaaataatgatgccacaagatgatttagtgatatcagaaatagattttaataataattcaatagttttaggtaaatgtgaaatctggagaatggaaggtggttcaggtcatactgtaactgatgatatagatcacttcttttcagcaccatcaataacatatagagagccacacttatctatatatgacgtattggaagtacaaaaagaagaacttgatttgtcaaaagatttaatggtattacctaatgctccaaatagagtatttgcttgggaaacaggatggacaccaggtttaagaagcttagaaaatgatggcacaaaactgttagaccgtataagagataactatgaaggtgagttttattggagatattttgcttttatagctgatgctttaataacaacattaaaaccaagatatgaagatactaatataagaataaatttagatagtaatactagaagttttatagttccaataataactacagaatatataagagaaaaattatcatattctttctatggttcaggaggaacttatgcattgtctctttctcaatataatatgggtataaatatagaattaagtgaaagtgatgtttggattatagatgttgataatgttgtgagagatgtaactatagaatctgataaaattaaaaaaggtgatttaatagaaggtattttatctacactaagtattgaagagaataaaattatcttaaatagccatgagattaatttttctggtgaggtaaatggaagtaatggatttgtttctttaacattttcaattttagaaggaataaatgcaattatagaagttgatttattatctaaatcatataaattacttatttctggcgaattaaaaatattgatgttaaattcaaatcatattcaacagaaaatagattatataggattcaatagcgaattacagaaaaatataccatatagctttgtagatagtgaaggaaaagagaatggttttattaatggttcaacaaaagaaggtttatttgtatctgaattacctgatgtagttcttataagtaaggtttatatggatgatagtaagccttcatttggatattatagtaataatttgaaagatgtcaaagttataactaaagataatgttaatatattaacaggttattatcttaaggatgatataaaaatctctctttctttgactctacaagatgaaaaaactataaagttaaatagtgtgcatttagatgaaagtggagtagctgagattttgaagttcatgaatagaaaaggtaatacaaatacttcagattctttaatgagctttttagaaagtatgaatataaaaagtattttcgttaatttcttacaatctaatattaagtttatattagatgctaattttataataagtggtactacttctattggccaatttgagtttatttgtgatgaaaatgataatatacaaccatatttcattaagtttaatacactagaaactaattatactttatatgtaggaaatagacaaaatatgatagtggaaccaaattatgatttagatgattctggagatatatcttcaactgttatcaatttctctcaaaagtatctttatggaatagacagttgtgttaataaagttgtaatttcaccaaatatttatacagatgaaataaatataacgcctgtatatgaaacaaataatacttatccagaagttattgtattagatgcaaattatataaatgaaaaaataaatgttaatatcaatgatctatctatacgatatgtatggagtaatgatggtaatgattttattcttatgtcaactagtgaagaaaataaggtgtcacaagttaaaataagattcgttaatgtttttaaagataagactttggcaaataagctatcttttaactttagtgataaacaagatgtacctgtaagtgaaataatcttatcatttacaccttcatattatgaggatggattgattggctatgatttgggtctagtttctttatataatgagaaattttatattaataactttggaatgatggtatctggattaatatatattaatgattcattatattattttaaaccaccagtaaataatttgataactggatttgtgactgtaggcgatgataaatactactttaatccaattaatggtggagctgcttcaattggagagacaataattgatgacaaaaattattatttcaaccaaagtggagtgttacaaacaggtgtatttagtacagaagatggatttaaatattttgccccagctaatacacttgatgaaaacctagaaggagaagcaattgattttactggaaaattaattattgacgaaaatatttattattttgatgataattatagaggagctgtagaatggaaagaattagatggtgaaatgcactattttagcccagaaacaggtaaagcttttaaaggtctaaatcaaataggtgattataaatactatttcaattctgatggagttatgcaaaaaggatttgttagtataaatgataataaacactattttgatgattctggtgttatgaaagtaggttacactgaaatagatggcaagcatttctactttgctgaaaacggagaaatgcaaataggagtatttaatacagaagatggatttaaatattttgctcatcataatgaagatttaggaaatgaagaaggtgaagaaatctcatattctggtatattaaatttcaataataaaatttactattttgatgattcatttactgctgtagttggatggaaagatttagaggatggttcaaagtattattttgatgaagatacagcagaagcatatataggtttgtcattaataaatgatggtcaatattattttaatgatgatggaattatgcaagttggatttgtcactataaatgataaagtcttctacttctctgactctggaattatagaatctggagtacaaaacatagatgacaattatttctatatagatgataatggtatagttcaaattggtgtatttgatacttcagatggatataaatattttgcacctgctaatactgtaaatgataatatttacggacaagcagttgaatatagtggtttagttagagttggtgaagatgtatattattttggagaaacatatacaattgagactggatggatatatgatatggaaaatgaaagtgataaatattatttcaatccagaaactaaaaaagcatgcaaaggtattaatttaattgatgatataaaatattattttgatgagaagggcataatgagaacgggtcttatatcatttgaaaataataattattactttaatgagaatggtgaaatgcaatttggttatataaatatagaagataagatgttctattttggtgaagatggtgtcatgcagattggagtatttaatacaccagatggatttaaatactttgcacatcaaaatactttggatgagaattttgagggagaatcaataaactatactggttggttagatttagatgaaaagagatattattttacagatgaatatattgcagcaactggttcagttattattgatggtgaggagtattattttgatcctgatacagctcaattagtgattagtgaatag

SEQ ID NO: 48 - DNA, 21 bp, synthetic construct
  misc_feature 1..21: note = Synthetic nucleic acid sequence
  source 1..21: mol_type = other DNA
tcgtcgtttttcggtgctttt

SEQ ID NO: 49 - protein, 118 aa, synthetic construct
  REGION 1..118: note = Synthetic amino acid sequence
QVQLQQPGAELVKPGAPVKLSCKASGYSFTSYWMNWVKQRPGRGLEWIGRIDPSNSEIYYNQKFKDKATLTVDKSSSTAYIQLSSLTSEDSAVYYCASGHYGSIFAYWGQGTTLTVSS

SEQ ID NO: 50 - protein, 19 aa, synthetic construct
  REGION 1..19: note = Synthetic amino acid sequence
MGWSCIILFLVATATGVHS

SEQ ID NO: 51 - protein, 10 aa, synthetic construct
  REGION 1..10: note = Synthetic amino acid sequence
GYSFTSYWMN

SEQ ID NO: 52 - protein, 15 aa, synthetic construct
  REGION 1..15: note = Synthetic amino acid sequence
RIDPSNSEIYYNQKF

SEQ ID NO: 53 - protein, 9 aa, synthetic construct
  REGION 1..9: note = Synthetic amino acid sequence
GHYGSIFAY

SEQ ID NO: 54 - protein, 17 aa, synthetic construct
  REGION 1..17: note = Synthetic amino acid sequence
AKTTPPSVYPLAPGNSK

SEQ ID NO: 55 - protein, 125 aa, synthetic construct
  REGION 1..125: note = Synthetic amino acid sequence
VQITQSPSYLAASPGETITINCRASKSISKYLAWYQEKPGKTNKLLLYSGSTLQSGIPSRFSGSRSGTDFTLIISSLEPEDSAMYYCQQHNEYPLTFGAGTKLELKRADAAPTVSIFPPSSEEFQ

SEQ ID NO: 56 - protein, 21 aa, synthetic construct
  REGION 1..21: note = Synthetic amino acid sequence
MRFQVQVLGLLLLWISGAQCD

SEQ ID NO: 57 - protein, 11 aa, synthetic construct
  REGION 1..11: note = Synthetic amino acid sequence
RASKSISKYLA

SEQ ID NO: 58 - protein, 7 aa, synthetic construct
  REGION 1..7: note = Synthetic amino acid sequence
SGSTLQS

SEQ ID NO: 59 - protein, 9 aa, synthetic construct
  REGION 1..9: note = Synthetic amino acid sequence
QQHNEYPLT

SEQ ID NO: 60 - protein, 121 aa, synthetic construct
  REGION 1..121: note = Synthetic amino acid sequence
QVQLQQPGAELVKPGASVKLSCKASGYTFTSYWMHWVKQRPGQGLEWIGVINPSNGRSTYSEKFKTTATVTVDKSSSTAYMQLSILTSEDSAVYYCARAYYSTSYYAMDYWGQGTSVTVSS

SEQ ID NO: 61 - protein, 19 aa, synthetic construct
  REGION 1..19: note = Synthetic amino acid sequence
MGWSYIILFLVATATDVHS

SEQ ID NO: 62 - protein, 10 aa, synthetic construct
  REGION 1..10: note = Synthetic amino acid sequence
GYTFTSYWMH

SEQ ID NO: 63 - protein, 15 aa, synthetic construct
  REGION 1..15: note = Synthetic amino acid sequence
VINPSNGRSTYSEKF

SEQ ID NO: 64 - protein, 12 aa, synthetic construct
  REGION 1..12: note = Synthetic amino acid sequence
AYYSTSYYAMDY

SEQ ID NO: 65 - protein, 17 aa, synthetic construct
  REGION 1..17: note = Synthetic amino acid sequence
AKTTPPSVYPLAPGNSK

SEQ ID NO: 66 - protein, 130 aa, synthetic construct
  REGION 1..130: note = Synthetic amino acid sequence
VLMTQSPLSLPVSLGDQASISCRSSQNIVHSNGNTYLEWYLQKPGQSPKLLIYKVSNRFSGVPDRFSGSGSGTYFTLKISRVEAEDLGVYYCFQGSHFPFTFGTGTKLEIKRADAAPTVSIFPPSSEEFQ

SEQ ID NO: 67 - protein, 20 aa, synthetic construct
  REGION 1..20: note = Synthetic amino acid sequence
MKLPVRLLVLMFWIPASSSD

SEQ ID NO: 68 - protein, 16 aa, synthetic construct
  REGION 1..16: note = Synthetic amino acid sequence
RSSQNIVHSNGNTYLE

SEQ ID NO: 69 - protein, 7 aa, synthetic construct
  REGION 1..7: note = Synthetic amino acid sequence
KVSNRFS

SEQ ID NO: 70 - protein, 9 aa, synthetic construct
  REGION 1..9: note = Synthetic amino acid sequence
FQGSHFPFT

SEQ ID NO: 71 - protein, 118 aa, synthetic construct
  REGION 1..118: note = Synthetic amino acid sequence
QVQLQQPGAEVVKPGAPVKLSCKASGYPFTNYWMNWVKQRPGRGLEWIGRIDPSNSEIYYNQKFKDKATLTVDKSSSTAYIQLSSLTSEDSAVYYCASGHYGSIFAYWGQGTTLTVSS

SEQ ID NO: 72 - protein, 19 aa, synthetic construct
  REGION 1..19: note = Synthetic amino acid sequence
MGWSCIILFLVATATGVHS

SEQ ID NO: 73 - protein, 10 aa, synthetic construct
  REGION 1..10: note = Synthetic amino acid sequence
GYPFTNYWMN

SEQ ID NO: 74 - protein, 15 aa, synthetic construct
  REGION 1..15: note = Synthetic amino acid sequence
RIDPSNSEIYYNQKF

SEQ ID NO: 75 - protein, 9 aa, synthetic construct
  REGION 1..9: note = Synthetic amino acid sequence
GHYGSIFAY

SEQ ID NO: 76 - protein, 17 aa, synthetic construct
  REGION 1..17: note = Synthetic amino acid sequence
AKTTPPSVYPLAPGNSK

SEQ ID NO: 77 - protein, 125 aa, synthetic construct
  REGION 1..125: note = Synthetic amino acid sequence
VQITQSPSYLAASPGETITINCRASKSISKYLAWYQEKPGKTNKLLIYSGSTLQSGIPSRFSGSRSGTDFTLIISSLEPEDSAMYYCQQHNEYPLTFGAGTKLELKRADAAPTVSIFPPSSEEFQ

SEQ ID NO: 78 - protein, 21 aa, synthetic construct
  REGION 1..21: note = Synthetic amino acid sequence
MRFQVQVLGLLLLWISGAQCD

SEQ ID NO: 79 - protein, 11 aa, synthetic construct
  REGION 1..11: note = Synthetic amino acid sequence
RASKSISKYLA

SEQ ID NO: 80 - protein, 7 aa, synthetic construct
  REGION 1..7: note = Synthetic amino acid sequence
SGSTLQS

SEQ ID NO: 81 - protein, 9 aa, synthetic construct
  REGION 1..9: note = Synthetic amino acid sequence
QQHNEYPLT

SEQ ID NO: 82 - protein, 2366 aa, synthetic construct
  REGION 1..2366: note = Synthetic amino acid sequence
  SITE 102: note = MISC_FEATURE - Xaa is any amino acid.
  SITE 270: note = MISC_FEATURE - Xaa is any amino acid.
  SITE 273: note = MISC_FEATURE - Xaa is any amino acid.
  SITE 286: note = MISC_FEATURE - Xaa is any amino acid.
  SITE 288: note = MISC_FEATURE - Xaa is any amino acid.
  SITE 384: note = MISC_FEATURE - Xaa is any amino acid.
  SITE 461: note = MISC_FEATURE - Xaa is any amino acid.
  SITE 463: note = MISC_FEATURE - Xaa is any amino acid.
  SITE 520: note = MISC_FEATURE - Xaa is any amino acid.
  SITE 543: note = MISC_FEATURE - Xaa is any amino acid.
  SITE 544: note = MISC_FEATURE - Xaa is any amino acid.
  SITE 587: note = MISC_FEATURE - Xaa is any amino acid.
  SITE 600: note = MISC_FEATURE - Xaa is any amino acid.
  SITE 653: note = MISC_FEATURE - Xaa is any amino acid.
  SITE 698: note = MISC_FEATURE - Xaa is any amino acid.
  SITE 751: note = MISC_FEATURE - Xaa is any amino acid.
MSLVNRKQLEKMANVRFRTQEDEYVAILDALEEYHNMSENTVVEKYLKLKDINSLTDIYIDTYKKSGRNKALKKFKEYLVTEVLELKNNNLTPVEKNLHFVXIGGQINDTAINYINQWKDVNSDYNVNVFYDSNAFLINTLKKTVVESAINDTLESFRENLNDPRFDYNKFFRKRMEIIYDKQKNFINYYKAQREENPELIIDDIVKTYLSNEYSKEIDELNTYIEESLNKITQNSGNDVRNFEEFKNGESFNLYEQELVERWNLAAASXILXISALKEIGGMYLXVXMLPGIQPDLFESIEKPSSVTVDFWEMTKLEAIMKYKEYIPEYTSEHFDMLDEEVQSSFESVLASKSDKSEIFSSLGDMEASPLEVKIAFNSKGIIXQGLISVKDSYCSNLIVKQIENRYKILNNSLNPAISEDNDFNTTTNTFIDSIMAEANADNGRFMMELGKYLRVGFFPXVXTTINLSGPEAYAAAYQDLLMFKEGSMNIHLIEADLRNFEISKTNISQSTEQEMASLXSFDDARAKAQFEEYKRNYFEGSXXEDDNLDFSQNIVVDKEYLLEKISSLARSSERGYIHYIVQLQGXKISYEAACNLFAXTPYDSVLFQKNIEDSEIAYYYNPGDGEIQEIDKYKIPSIISDRPKIKLTFIGXGKDEFNTDIFAGFDVDSLSTEIEAAIDLAKEDISPKSIEINLLGXNMFSYSINVEETYPGKLLLKVKDKISELMPSISQDSIIVSANQYEVRINSEGXRELLDHSGEWINKEESIIKDISSKEYISFNPKENKITVKSKNLPELSTLLQEIRNNSNSSDIELEEKVMLTECEINVISNIDTQIVEERIEEAKNLTSDSINYIKDEFKLIESISDALCDLKQQNELEDSHFISFEDISETDEGFSIRFINKETGESIFVETEKTIFSEYANHITEEISKIKGTIFDTVNGKLVKKVNLDTTHEVNTLNAAFFIQSLIEYNSSKESLSNLSVAMKVQVYAQLFSTGLNTITDAAKVVELVSTALDETIDLLPTLSEGLPIIATIIDGVSLGAAIKELSETSDPLLRQEIEAKIGIMAVNLTTATTAIITSSLGIASGFSILLVPLAGISAGIPSLVNNELVLRDKATKVVDYFKHVSLVETEGVFTLLDDKIMMPQDDLVISEIDFNNNSIVLGKCEIWRMEGGSGHTVTDDIDHFFSAPSITYREPHLSIYDVLEVQKEELDLSKDLMVLPNAPNRVFAWETGWTPGLRSLENDGTKLLDRIRDNYEGEFYWRYFAFIADALITTLKPRYEDTNIRINLDSNTRSFIVPIITTEYIREKLSYSFYGSGGTYALSLSQYNMGINIELSESDVWIIDVDNVVRDVTIESDKIKKGDLIEGILSTLSIEENKIILNSHEINFSGEVNGSNGFVSLTFSILEGINAIIEVDLLSKSYKLLISGELKILMLNSNHIQQKIDYIGFNSELQKNIPYSFVDSEGKENGFINGSTKEGLFVSELPDVVLISKVYMDDSKPSFGYYSNNLKDVKVITKDNVNILTGYYLKDDIKISLSLTLQDEKTIKLNSVHLDESGVAEILKFMNRKGNTNTSDSLMSFLESMNIKSIFVNFLQSNIKFILDANFIISGTTSIGQFEFICDENDNIQPYFIKFNTLETNYTLYVGNRQNMIVEPNYDLDDSGDISSTVINFSQKYLYGIDSCVNKVVISPNIYTDEINITPVYETNNTYPEVIVLDANYINEKINVNINDLSIRYVWSNDGNDFILMSTSEENKVSQVKIRFVNVFKDKTLANKLSFNFSDKQDVPVSEIILSFTPSYYEDGLIGYDLGLVSLYNEKFYINNFGMMVSGLIYINDSLYYFKPPVNNLITGFVTVGDDKYYFNPINGGAASIGETIIDDKNYYFNQSGVLQTGVFSTEDGFKYFAPANTLDENLEGEAIDFTGKLIIDENIYYFDDNYRGAVEWKELDGEMHYFSPETGKAFKGLNQIGDYKYYFNSDGVMQKGFVSINDNKHYFDDSGVMKVGYTEIDGKHFYFAENGEMQIGVFNTEDGFKYFAHHNEDLGNEEGEEISYSGILNFNNKIYYFDDSFTAVVGWKDLEDGSKYYFDEDTAEAYIGLSLINDGQYYFNDDGIMQVGFVTINDKVFYFSDSGIIESGVQNIDDNYFYIDDNGIVQIGVFDTSDGYKYFAPANTVNDNIYGQAVEYSGLVRVGEDVYYFGETYTIETGWIYDMENESDKYYFNPETKKACKGINLIDDIKYYFDEKGIMRTGLISFENNNYYFNENGEMQFGYINIEDKMFYFGEDGVMQIGVFNTPDGFKYFAHQNTLDENFEGESINYTGWLDLDEKRYYFTDEYIAATGSVIIDGEEYYFDPDTAQLVISE

SEQ ID NO: 83 - protein, 2709 aa, synthetic construct
  REGION 1..2709: note = Synthetic amino acid sequence
SLISKEELIKLAYSIRPRENEYKTILTNLDEYNKLTTNNNENKYLQLKKLNESIDVFMNKYKTSSRNRALSNLKKDILKEVILIKNSNTSPVEKNLHFVWIGGEVSDIALEYIKQWADINAEYNIKLWYDSEAFLVNTLKKAIVESSTTEALQLLEEEIQNPQFDNMKFYKKRMEFIYDRQKRFINYYKSQINKPTVPTIDDIIKSHLVSEYNRDETVLESYRTNSLRKINSNHGIDIRANSLFTEQELLNIYSQELLNRGNLAAASAIVALLALKNFGGVYLAVAMLPGIHSDLFKTISRPSSIGLDRWEMIKLEAIMKYKKYINNYTSENFDKLDQQLKDNFKLIIESKSEKSEIFSKLENLNVSDLEIKIAFALGSVINQALISKQGSYLTNLVIEQVKNRYQFLNQHLNPAIESDNNFTDTTKIFHDSLFNSATAENSMFLTKIAPYLQVGFMPAAASTISLSGPGAYASAYYDFINLQENTIEKTLKASDLIEFKFPENNLSQLTEQEINSLWSFDQASAKYQFEKYVRDYTGGSLSEDNGVDFNKNTALDKNYLLNNKIPSNNVEEAGSKNYVHYIIQLQGDDISYEATCNLFSKNPKNSIIIQRNMNESAKSYFLSDDGESILELNKYRIPERLKNKEKVKVTFIGHGKDEFNTSEFARLSVDSLSNEISSFLDTIKLDISPKNVEVNLLGANMFSYDFNVEETYPGKLLLSIMDKITSTLPDVNKNSITIGANQYEVRINSEGRKELLAHSGKWINKEEAIMSDLSSKEYIFFDSIDNKLKAKSKNIPGLASISEDIKTLLLDASVSPDTKFILNNLKLNIESSIGDYIYYEKLEPVKNIIHNSIDDLIDEFNLLENVSDELYELKKLNNLDEKYLISFEDISKNNSTYSVRFINKSNGESVYVETEKEIFSKYSEHITKEISTIKNSIITDVNGNLLDNIQLDHTSQVNTLNAAFFIQSLIDYSSNKDVLNDLSTSVKVQLYAQLFSTGLNTIYDSIQLVNLISNAVNDTINVLPTITEGIPIVSTILDGINLGAAIKELLDEHDPLLKKELEAKVGVLAINMSLSIAATVASIVGIGAEVTIFLLPIAGISAGIPSLVNNELILHDKATSVVNYFNHLSESKKYGPLKTEDDKILVPIDDLVISEIDFNNNSIKLGTCNILAMEGGSGHTVTGNIDHFFSSPSISSHIPSLSIYSAIGIETENLDFSKKIMMLPNAPSRVFWWETGAVPGLRSLENDGTRLLDSIRDLYPGKFYWRFYAFFDYAITTLKPVYEDTNIKIKLDKDTRNFIMPTITTNEIRNKLSYSFDGAGGTYSLLLSSYPISTNINLSKDDLWIFNIDNEVREISIENGTIKKGKLIKDVLSKIDINKNKLIIGNQTIDFSGDIDNKDRYIFLTCELDDKISLIIEINLVAKSYSLLLSGDKNYLISNLSNIIEKINTLGLDSKNIAYNYTDESNNKYFGAISKTSQKSIIHYKKDSKNILEFYNDSTLEFNSKDFIAEDINVFMKDDINTITGKYYVDNNTDKSIDFSISLVSKNQVKVNGLYLNESVYSSYLDFVKNSDGHHNTSNFMNLFLDNISFWKLFGFENINFVIDKYFTLVGKTNLGYVEFICDNNKNIDIYFGEWKTSSSKSTIFSGNGRNVVVEPIYNPDTGEDISTSLDFSYEPLYGIDRYINKVLIAPDLYTSLININTNYYSNEYYPEIIVLNPNTFHKKVNINLDSSSFEYKWSTEGSDFILVRYLEESNKKILQKIRIKGILSNTQSFNKMSIDFKDIKKLSLGYIMSNFKSFNSENELDRDHLGFKIIDNKTYYYDEDSKLVKGLININNSLFYFDPIEFNLVTGWQTINGKKYYFDINTGAALISYKIINGKHFYFNNDGVMQLGVFKGPDGFEYFAPANTQNNNIEGQAIVYQSKFLTLNGKKYYFDNDSKAVTGWRIINNEKYYFNPNNAIAAVGLQVIDNNKYYFNPDTAIISKGWQTVNGSRYYFDTDTAIAFNGYKTIDGKHFYFDSDCVVKIGVFSTSNGFEYFAPANTYNNNIEGQAIVYQSKFLTLNGKKYYFDNNSKAVTGWQTIDSKKYYFNTNTAEAATGWQTIDGKKYYFNTNTAEAATGWQTIDGKKYYFNTNTAIASTGYTIINGKHFYFNTDGIMQIGVFKGPNGFEYFAPANTDANNIEGQAILYQNEFLTLNGKKYYFGSDSKAVTGWRIINNKKYYFNPNNAIAAIHLCTINNDKYYFSYDGILQNGYITIERNNFYFDANNESKMVTGVFKGPNGFEYFAPANTHNNNIEGQAIVYQNKFLTLNGKKYYFDNDSKAVTGWQTIDGKKYYFNLNTAEAATGWQTIDGKKYYFNLNTAEAATGWQTIDGKKYYFNTNTFIASTGYTSINGKHFYFNTDGIMQIGVFKGPNGFEYFAPANTHNNNIEGQAILYQNKFLTLNGKKYYFGSDSKAVTGLRTIDGKKYYFNTNTAVAVTGWQTINGKKYYFNTNTSIASTGYTIISGKHFYFNTDGIMQIGVFKGPDGFEYFAPANTDANNIEGQAIRYQNRFLYLHDNIYYFGNNSKAATGWVTIDGNRYYFEPNTAMGANGYKTIDNKNFYFRNGLPQIGVFKGSNGFEYFAPANTDANNIEGQAIRYQNRFLHLLGKIYYFGNNSKAVTGWQTINGKVYYFMPDTAMAAAGGLFEIDGVIYFFGVDGVKAPGIYG

SEQ ID NO: 84 - protein, 2709 aa, synthetic construct
  REGION 1..2709: note = Synthetic amino acid sequence
SLISKEELIKLAYSIRPRENEYKTILTNLDEYNKLTTNNNENKYLQLKKLNESIDVFMNKYKTSSRNRALSNLKKDILKEVILIKNSNTSPVEKNLHFVWIGGEVSDIALEYIKQWADINAEYNIKLWYDSEAFLVNTLKKAIVESSTTEALQLLEEEIQNPQFDNMKFYKKRMEFIYDRQKRFINYYKSQINKPTVPTIDDIIKSHLVSEYNRDETVLESYRTNSLRKINSNHGIDIRANSLFTEQELLNIYSQELLNRGNLAAASDIVRLLALKNFGGVYLAVAMLPGIHSDLFKTISRPSSIGLDRWEMIKLEAIMKYKKYINNYTSENFDKLDQQLKDNFKLIIESKSEKSEIFSKLENLNVSDLEIKIAFALGSVINQALISKQGSYLTNLVIEQVKNRYQFLNQHLNPAIESDNNFTDTTKIFHDSLFNSATAENSMFLTKIAPYLQVGFMPEARSTISLSGPGAYASAYYDFINLQENTIEKTLKASDLIEFKFPENNLSQLTEQEINSLWSFDQASAKYQFEKYVRDYTGGSLSEDNGVDFNKNTALDKNYLLNNKIPSNNVEEAGSKNYVHYIIQLQGDDISYEATCNLFSKNPKNSIIIQRNMNESAKSYFLSDDGESILELNKYRIPERLKNKEKVKVTFIGHGKDEFNTSEFARLSVDSLSNEISSFLDTIKLDISPKNVEVNLLGANMFSYDFNVEETYPGKLLLSIMDKITSTLPDVNKNSITIGANQYEVRINSEGRKELLAHSGKWINKEEAIMSDLSSKEYIFFDSIDNKLKAKSKNIPGLASISEDIKTLLLDASVSPDTKFILNNLKLNIESSIGDYIYYEKLEPVKNIIHNSIDDLIDEFNLLENVSDELYELKKLNNLDEKYLISFEDISKNNSTYSVRFINKSNGESVYVETEKEIFSKYSEHITKEISTIKNSIITDVNGNLLDNIQLDHTSQVNTLNAAFFIQSLIDYSSNKDVLNDLSTSVKVQLYAQLFSTGLNTIYDSIQLVNLISNAVNDTINVLPTITEGIPIVSTILDGINLGAAIKELLDEHDPLLKKELEAKVGVLAINMSLSIAATVASIVGIGAEVTIFLLPIAGISAGIPSLVNNELILHDKATSVVNYFNHLSESKKYGPLKTEDDKILVPIDDLVISEIDFNNNSIKLGTCNILAMEGGSGHTVTGNIDHFFSSPSISSHIPSLSIYSAIGIETENLDFSKKIMMLPNAPSRVFWWETGAVPGLRSLENDGTRLLDSIRDLYPGKFYWRFYAFFDYAITTLKPVYEDTNIKIKLDKDTRNFIMPTITTNEIRNKLSYSFDGAGGTYSLLLSSYPISTNINLSKDDLWIFNIDNEVREISIENGTIKKGKLIKDVLSKIDINKNKLIIGNQTIDFSGDIDNKDRYIFLTCELDDKISLIIEINLVAKSYSLLLSGDKNYLISNLSNIIEKINTLGLDSKNIAYNYTDESNNKYFGAISKTSQKSIIHYKKDSKNILEFYNDSTLEFNSKDFIAEDINVFMKDDINTITGKYYVDNNTDKSIDFSISLVSKNQVKVNGLYLNESVYSSYLDFVKNSDGHHNTSNFMNLFLDNISFWKLFGFENINFVIDKYFTLVGKTNLGYVEFICDNNKNIDIYFGEWKTSSSKSTIFSGNGRNVVVEPIYNPDTGEDISTSLDFSYEPLYGIDRYINKVLIAPDLYTSLININTNYYSNEYYPEIIVLNPNTFHKKVNINLDSSSFEYKWSTEGSDFILVRYLEESNKKILQKIRIKGILSNTQSFNKMSIDFKDIKKLSLGYIMSNFKSFNSENELDRDHLGFKIIDNKTYYYDEDSKLVKGLININNSLFYFDPIEFNLVTGWQTINGKKYYFDINTGAALISYKIINGKHFYFNNDGVMQLGVFKGPDGFEYFAPANTQNNNIEGQAIVYQSKFLTLNGKKYYFDNDSKAVTGWRIINNEKYYFNPNNAIAAVGLQVIDNNKYYFNPDTAIISKGWQTVNGSRYYFDTDTAIAFNGYKTIDGKHFYFDSDCVVKIGVFSTSNGFEYFAPANTYNNNIEGQAIVYQSKFLTLNGKKYYFDNNSKAVTGWQTIDSKKYYFNTNTAEAATGWQTIDGKKYYFNTNTAEAATGWQTIDGKKYYFNTNTAIASTGYTIINGKHFYFNTDGIMQIGVFKGPNGFEYFAPANTDANNIEGQAILYQNEFLTLNGKKYYFGSDSKAVTGWRIINNKKYYFNPNNAIAAIHLCTINNDKYYFSYDGILQNGYITIERNNFYFDANNESKMVTGVFKGPNGFEYFAPANTHNNNIEGQAIVYQNKFLTLNGKKYYFDNDSKAVTGWQTIDGKKYYFNLNTAEAATGWQTIDGKKYYFNLNTAEAATGWQTIDGKKYYFNTNTFIASTGYTSINGKHFYFNTDGIMQIGVFKGPNGFEYFAPANTHNNNIEGQAILYQNKFLTLNGKKYYFGSDSKAVTGLRTIDGKKYYFNTNTAVAVTGWQTINGKKYYFNTNTSIASTGYTIISGKHFYFNTDGIMQIGVFKGPDGFEYFAPANTDANNIEGQAIRYQNRFLYLHDNIYYFGNNSKAATGWVTIDGNRYYFEPNTAMGANGYKTIDNKNFYFRNGLPQIGVFKGSNGFEYFAPANTDANNIEGQAIRYQNRFLHLLGKIYYFGNNSKAVTGWQTINGKVYYFMPDTAMAAAGGLFEIDGVIYFFGVDGVKAPGIYG

SEQ ID NO: 85 - protein, 2365 aa, synthetic construct
  REGION 1..2365: note = Synthetic amino acid sequence
SLVNRKQLEKMANVRFRTQEDEYVAILDALEEYHNMSENTVVEKYLKLKDINSLTDIYIDTYKKSGRNKALKKFKEYLVTEVLELKNNNLTPVEKNLHFVWIGGQINDTAINYINQWKDVNSDYNVNVFYDSNAFLINTLKKTVVESAINDTLESFRENLNDPRFDYNKFFRKRMEIIYDKQKNFINYYKAQREENPELIIDDIVKTYLSNEYSKEIDELNTYIEESLNKITQNSGNDVRNFEEFKNGESFNLYEQELVERWNLAAASAILAISALKEIGGMYLAVAMLPGIQPDLFESIEKPSSVTVDFWEMTKLEAIMKYKEYIPEYTSEHFDMLDEEVQSSFESVLASKSDKSEIFSSLGDMEASPLEVKIAFNSKGIINQGLISVKDSYCSNLIVKQIENRYKILNNSLNPAISEDNDFNTTTNTFIDSIMAEANADNGRFMMELGKYLRVGFFPAVATTINLSGPEAYAAAYQDLLMFKEGSMNIHLIEADLRNFEISKTNISQSTEQEMASLWSFDDARAKAQFEEYKRNYFEGSLGEDDNLDFSQNIVVDKEYLLEKISSLARSSERGYIHYIVQLQGDKISYEAACNLFAKTPYDSVLFQKNIEDSEIAYYYNPGDGEIQEIDKYKIPSIISDRPKIKLTFIGHGKDEFNTDIFAGFDVDSLSTEIEAAIDLAKEDISPKSIEINLLGANMFSYSINVEETYPGKLLLKVKDKISELMPSISQDSIIVSANQYEVRINSEGRRELLDHSGEWINKEESIIKDISSKEYISFNPKENKITVKSKNLPELSTLLQEIRNNSNSSDIELEEKVMLTECEINVISNIDTQIVEERIEEAKNLTSDSINYIKDEFKLIESISDALCDLKQQNELEDSHFISFEDISETDEGFSIRFINKETGESIFVETEKTIFSEYANHITEEISKIKGTIFDTVNGKLVKKVNLDTTHEVNTLNAAFFIQSLIEYNSSKESLSNLSVAMKVQVYAQLFSTGLNTITDAAKVVELVSTALDETIDLLPTLSEGLPIIATIIDGVSLGAAIKELSETSDPLLRQEIEAKIGIMAVNLTTATTAIITSSLGIASGFSILLVPLAGISAGIPSLVNNELVLRDKATKVVDYFKHVSLVETEGVFTLLDDKIMMPQDDLVISEIDFNNNSIVLGKCEIWRMEGGSGHTVTDDIDHFFSAPSITYREPHLSIYDVLEVQKEELDLSKDLMVLPNAPNRVFAWETGWTPGLRSLENDGTKLLDRIRDNYEGEFYWRYFAFIADALITTLKPRYEDTNIRINLDSNTRSFIVPIITTEYIREKLSYSFYGSGGTYALSLSQYNMGINIELSESDVWIIDVDNVVRDVTIESDKIKKGDLIEGILSTLSIEENKIILNSHEINFSGEVNGSNGFVSLTFSILEGINAIIEVDLLSKSYKLLISGELKILMLNSNHIQQKIDYIGFNSELQKNIPYSFVDSEGKENGFINGSTKEGLFVSELPDVVLISKVYMDDSKPSFGYYSNNLKDVKVITKDNVNILTGYYLKDDIKISLSLTLQDEKTIKLNSVHLDESGVAEILKFMNRKGNTNTSDSLMSFLESMNIKSIFVNFLQSNIKFILDANFIISGTTSIGQFEFICDENDNIQPYFIKFNTLETNYTLYVGNRQNMIVEPNYDLDDSGDISSTVINFSQKYLYGIDSCVNKVVISPNIYTDEINITPVYETNNTYPEVIVLDANYINEKINVNINDLSIRYVWSNDGNDFILMSTSEENKVSQVKIRFVNVFKDKTLANKLSFNFSDKQDVPVSEIILSFTPSYYEDGLIGYDLGLVSLYNEKFYINNFGMMVSGLIYINDSLYYFKPPVNNLITGFVTVGDDKYYFNPINGGAASIGETIIDDKNYYFNQSGVLQTGVFSTEDGFKYFAPANTLDENLEGEAIDFTGKLIIDENIYYFDDNYRGAVEWKELDGEMHYFSPETGKAFKGLNQIGDYKYYFNSDGVMQKGFVSINDNKHYFDDSGVMKVGYTEIDGKHFYFAENGEMQIGVFNTEDGFKYFAHHNEDLGNEEGEEISYSGILNFNNKIYYFDDSFTAVVGWKDLEDGSKYYFDEDTAEAYIGLSLINDGQYYFNDDGIMQVGFVTINDKVFYFSDSGIIESGVQNIDDNYFYIDDNGIVQIGVFDTSDGYKYFAPANTVNDNIYGQAVEYSGLVRVGEDVYYFGETYTIETGWIYDMENESDKYYFNPETKKACKGINLIDDIKYYFDEKGIMRTGLISFENNNYYFNENGEMQFGYINIEDKMFYFGEDGVMQIGVFNTPDGFKYFAHQNTLDENFEGESINYTGWLDLDEKRYYFTDEYIAATGSVIIDGEEYYFDPDTAQLVISE

SEQ ID NO: 86 - protein, 2365 aa, synthetic construct
  REGION 1..2365: note = Synthetic amino acid sequence
SLVNRKQLEKMANVRFRTQEDEYVAILDALEEYHNMSENTVVEKYLKLKDINSLTDIYIDTYKKSGRNKALKKFKEYLVTEVLELKNNNLTPVEKNLHFVWIGGQINDTAINYINQWKDVNSDYNVNVFYDSNAFLINTLKKTVVESAINDTLESFRENLNDPRFDYNKFFRKRMEIIYDKQKNFINYYKAQREENPELIIDDIVKTYLSNEYSKEIDELNTYIEESLNKITQNSGNDVRNFEEFKNGESFNLYEQELVERWNLAAASDILRISALKEIGGMYLAVAMLPGIQPDLFESIEKPSSVTVDFWEMTKLEAIMKYKEYIPEYTSEHFDMLDEEVQSSFESVLASKSDKSEIFSSLGDMEASPLEVKIAFNSKGIINQGLISVKDSYCSNLIVKQIENRYKILNNSLNPAISEDNDFNTTTNTFIDSIMAEANADNGRFMMELGKYLRVGFFPDVKTTINLSGPEAYAAAYQDLLMFKEGSMNIHLIEADLRNFEISKTNISQSTEQEMASLWSFDDARAKAQFEEYKRNYFEGSLGEDDNLDFSQNIVVDKEYLLEKISSLARSSERGYIHYIVQLQGDKISYEAACNLFAKTPYDSVLFQKNIEDSEIAYYYNPGDGEIQEIDKYKIPSIISDRPKIKLTFIGHGKDEFNTDIFAGFDVDSLSTEIEAAIDLAKEDISPKSIEINLLGANMFSYSINVEETYPGKLLLKVKDKISELMPSISQDSIIVSANQYEVRINSEGRRELLDHSGEWINKEESIIKDISSKEYISFNPKENKITVKSKNLPELSTLLQEIRNNSNSSDIELEEKVMLTECEINVISNIDTQIVEERIEEAKNLTSDSINYIKDEFKLIESISDALCDLKQQNELEDSHFISFEDISETDEGFSIRFINKETGESIFVETEKTIFSEYANHITEEISKIKGTIFDTVNGKLVKKVNLDTTHEVNTLNAAFFIQSLIEYNSSKESLSNLSVAMKVQVYAQLFSTGLNTITDAAKVVELVSTALDETIDLLPTLSEGLPIIATIIDGVSLGAAIKELSETSDPLLRQEIEAKIGIMAVNLTTATTAIITSSLGIASGFSILLVPLAGISAGIPSLVNNELVLRDKATKVVDYFKHVSLVETEGVFTLLDDKIMMPQDDLVISEIDFNNNSIVLGKCEIWRMEGGSGHTVTDDIDHFFSAPSITYREPHLSIYDVLEVQKEELDLSKDLMVLPNAPNRVFAWETGWTPGLRSLENDGTKLLDRIRDNYEGEFYWRYFAFIADALITTLKPRYEDTNIRINLDSNTRSFIVPIITTEYIREKLSYSFYGSGGTYALSLSQYNMGINIELSESDVWIIDVDNVVRDVTIESDKIKKGDLIEGILSTLSIEENKIILNSHEINFSGEVNGSNGFVSLTFSILEGINAIIEVDLLSKSYKLLISGELKILMLNSNHIQQKIDYIGFNSELQKNIPYSFVDSEGKENGFINGSTKEGLFVSELPDVVLISKVYMDDSKPSFGYYSNNLKDVKVITKDNVNILTGYYLKDDIKISLSLTLQDEKTIKLNSVHLDESGVAEILKFMNRKGNTNTSDSLMSFLESMNIKSIFVNFLQSNIKFILDANFIISGTTSIGQFEFICDENDNIQPYFIKFNTLETNYTLYVGNRQNMIVEPNYDLDDSGDISSTVINFSQKYLYGIDSCVNKVVISPNIYTDEINITPVYETNNTYPEVIVLDANYINEKINVNINDLSIRYVWSNDGNDFILMSTSEENKVSQVKIRFVNVFKDKTLANKLSFNFSDKQDVPVSEIILSFTPSYYEDGLIGYDLGLVSLYNEKFYINNFGMMVSGLIYINDSLYYFKPPVNNLITGFVTVGDDKYYFNPINGGAASIGETIIDDKNYYFNQSGVLQTGVFSTEDGFKYFAPANTLDENLEGEAIDFTGKLIIDENIYYFDDNYRGAVEWKELDGEMHYFSPETGKAFKGLNQIGDYKYYFNSDGVMQKGFVSINDNKHYFDDSGVMKVGYTEIDGKHFYFAENGEMQIGVFNTEDGFKYFAHHNEDLGNEEGEEISYSGILNFNNKIYYFDDSFTAVVGWKDLEDGSKYYFDEDTAEAYIGLSLINDGQYYFNDDGIMQVGFVTINDKVFYFSDSGIIESGVQNIDDNYFYIDDNGIVQIGVFDTSDGYKYFAPANTVNDNIYGQAVEYSGLVRVGEDVYYFGETYTIETGWIYDMENESDKYYFNPETKKACKGINLIDDIKYYFDEKGIMRTGLISFENNNYYFNENGEMQFGYINIEDKMFYFGEDGVMQIGVFNTPDGFKYFAHQNTLDENFEGESINYTGWLDLDEKRYYFTDEYIAATGSVIIDGEEYYFDPDTAQLVISE

SEQ ID NO: 87 - protein, 2710 aa, Clostridium difficile; identical to SEQ ID NO: 15

SEQ ID NO: 88 - protein, 2710 aa, Clostridium difficile
MSLISKEELIKLAYSIRPRENEYKTILTNLDEYNKLTTNNNENKYLQLKKLNESIDVFMNKYKTSSRNRALSNLKKDILKEVILIKNSNTSPVEKNLHFVWIGGEVSDIALEYIKQWADINAEYNIKLWYDSEAFLVNTLKKAIVESSTTEALQLLEEEIQNPQFDNMKFYKKRMEFIYDRQKRFINYYKSQINKPTVPTIDDIIKSHLVSEYNRDETVLESYRTNSLRKINSNHGIDIRANSLFTEQELLNIYSQELLNRGNLAAASDIVRLLALKNFGGVYLDVDMLPGIHSDLFKTISRPSSIGLDRWEMIKLEAIMKYKKYINNYTSENFDKLDQQLKDNFKLIIESKSEKSEIFSKLENLNVSDLEIKIAFALGSVINQALISKQGSYLTNLVIEQVKNRYQFLNQHLNPAIESDNNFTDTTKIFHDSLFNSATAENSMFLTKIAPYLQVGFMPEARSTISLSGPGAYASAYYDFINLQENTIEKTLKASDLIEFKFPENNLSQLTEQEINSLWSFDQASAKYQFEKYVRDYTGGSLSEDNGVDFNKNTALDKNYLLNNKIPSNNVEEAGSKNYVHYIIQLQGDDISYEATCNLFSKNPKNSIIIQRNMNESAKSYFLSDDGESILELNKYRIPERLKNKEKVKVTFIGHGKDEFNTSEFARLSVDSLSNEISSFLDTIKLDISPKNVEVNLLGCNMFSYDFNVEETYPGKLLLSIMDKITSTLPDVNKNSITIGANQYEVRINSEGRKELLAHSGKWINKEEAIMSDLSSKEYIFFDSIDNKLKAKSKNIPGLASISEDIKTLLLDASVSPDTKFILNNLKLNIESSIGDYIYYEKLEPVKNIIHNSIDDLIDEFNLLENVSDELYELKKLNNLDEKYLISFEDISKNNSTYSVRFINKSNGESVYVETEKEIFSKYSEHITKEISTIKNSIITDVNGNLLDNIQLDHTSQVNTLNAAFFIQSLIDYSSNKDVLNDLSTSVKVQLYAQLFSTGLNTIYDSIQLVNLISNAVNDTINVLPTITEGIPIVSTILDGINLGAAIKELLDEHDPLLKKELEAKVGVLAINMSLSIAATVASIVGIGAEVTIFLLPIAGISAGIPSLVNNELILHDKATSVVNYFNHLSESKKYGPLKTEDDKILVPIDDLVISEIDFNNNSIKLGTCNILAMEGGSGHTVTGNIDHFFSSPSISSHIPSLSIYSAIGIETENLDFSKKIMMLPNAPSRVFWWETGAVPGLRSLENDGTRLLDSIRDLYPGKFYWRFYAFFDYAITTLKPVYEDTNIKIKLDKDTRNFIMPTITTNEIRNKLSYSFDGAGGTYSLLLSSYPISTNINLSKDDLWIFNIDNEVREISIENGTIKKGKLIKDVLSKIDINKNKLIIGNQTIDFSGDIDNKDRYIFLTCELDDKISLIIEINLVAKSYSLLLSGDKNYLISNLSNTIEKINTLGLDSKNIAYNYTDESNNKYFGAISKTSQKSIIHYKKDSKNILEFYNDSTLEFNSKDFIAEDINVFMKDDINTITGKYYVDNNTDKSIDFSISLVSKNQVKVNGLYLNESVYSSYLDFVKNSDGHHNTSNFMNLFLDNISFWKLFGFENINFVIDKYFTLVGKTNLGYVEFICDNNKNIDIYFGEWKTSSSKSTIFSGNGRNVVVEPIYNPDTGEDISTSLDFSYEPLYGIDRYINKVLIAPDLYTSLININTNYYSNEYYPEIIVLNPNTFHKKVNINLDSSSFEYKWSTEGSDFILVRYLEESNKKILQKIRIKGILSNTQSFNKMSIDFKDIKKLSLGYIMSNFKSFNSENELDRDHLGFKIIDNKTYYYDEDSKLVKGLININNSLFYFDPIEFNLVTGWQTINGKKYYFDINTGAALTSYKIINGKHFYFNNDGVMQLGVFKGPDGFEYFAPANTQNNNIEGQAIVYQSKFLTLNGKKYYFDNDSKAVTGWRIINNEKYYFNPNNAIAAVGLQVIDNNKYYFNPDTAIISKGWQTVNGSRYYFDTDTAIAFNGYKTIDGKHFYFDSDCVVKIGVFSTSNGFEYFAPANTYNNNIEGQAIVYQSKFLTLNGKKYYFDNNSKAVTGWQTIDSKKYYFNTNTAEAATGWQTIDGKKYYFNTNTAEAATGWQTIDGKKYYFNTNTAIASTGYTIINGKHFYFNTDGIMQIGVFKGPNGFEYFAPANTDANNIEGQAILYQNEFLTLNGKKYYFGSDSKAVTGWRIINNKKYYFNPNNAIAAIHLCTINNDKYYFSYDGILQNGYITIERNNFYFDANNESKMVTGVFKGPNGFEYFAPANTHNNNIEGQAIVYQNKFLTLNGKKYYFDNDSKAVTGWQTIDGKKYYFNLNTAEAATGWQTIDGKKYYFNLNTAEAATGWQTIDGKKYYFNTNTFIASTGYTSINGKHFYFNTDGIMQIGVFKGPNGFEYFAPANTHNNNIEGQAILYQNKFLTLNGKKYYFGSDSKAVTGLRTIDGKKYYFNTNTAVAVTGWQTINGKKYYFNTNTSIASTGYTIISGKHFYFNTDGIMQIGVFKGPDGFEYFAPANTDANNIEGQAIRYQNRFLYLHDNIYYFGNNSKAATGWVTIDGNRYYFEPNTAMGANGYKTIDNKNFYFRNGLPQIGVFKGSNGFEYFAPANTDANNIEGQAIRYQNRFLHLLGKIYYFGNNSKAVTGWQTINGKVYYFMPDTAMAAAGGLFEIDGVIYFFGVDGVKAPGIYG

SEQ ID NO: 89 - protein, 2710 aa, Clostridium difficile; identical to SEQ ID NO: 15

SEQ ID NO: 90 - protein, 2710 aa, Clostridium difficile; identical to SEQ ID NO: 88

SEQ ID NO: 91 - protein, 2710 aa, Clostridium difficile; identical to SEQ ID NO: 88

SEQ ID NO: 92 - protein, 2710 aa, Clostridium difficile
MSLISKEELIKLAYSIRPRENEYKTILTNLDEYNKLTTNNNENKYLQLKKLNESIDVFMNKYKTSSRNRALSNLKKDILKEVILIKNSNTSPVEKNLHFVWIGGEVSDIALEYIKQWADINAEYNIKLWYDSEAFLVNTLKKAIVESSTTEALQLLEEEIQNPQFDNMKFYKKRMEFIYDRQKRFINYYKSQINKPTVPTIDDIIKSHLVSEYNRDETVLESYRTNSLRKINSNHGIDIRANSLFTEQELLNIYSQELLNRGNLAAASDIVRLLALKNFGGVYLDVDMLPGIHSDLFKTISRPSSIGLDRWEMIKLEAIMKYKKYINNYTSENFDKLDQQLKDNFKLIIESKSEKSEIFSKLENLNVSDLEIKIAFALGSVINQALISKQGSYLTNLVIEQVKNRYQFLNQHLNPAIESDNNFTDTTKIFHDSLFNSATAENSMFLTKIAPYLQVGFMPEARSTISLSGPGAYASAYYDFINLQENTIEKTLKASDLIEFKFPENNLSQLTEQEINSLWSFDQASAKYQFEKYVRDYTGGSLSEDNGVDFNKNTALDKNYLLNNKIPSNNVEEAGSKNYVHYIIQLQGDDISYEATCNLFSKNPKNSIIIQRNMNESAKSYFLSDDGESILELNKYRIPERLKNKEKVKVTFIGHGKDEFNTSEFARLSVDSLSNEISSFLDTIKLDISPKNVEVNLLGCNMFSYDFNVEETYPGKLLLSIMDKITSTLPDVNKNSITIGANQYEVRINSEGRKELLAHSGKWINKEEAIMSDLSSKEYIFFDSIDNKLKAKSKNIPGLASISEDIKTLLLDASVSPDTKFILNNLKLNIESSIGDYIYYEKLEPVKNIIHNSIDDLIDEFNLLENVSDELYELKKLNNLDEKYLISFEDISKNNSTYSVRFINKSNGESVYVETEKEIFSKYSEHITKEISTIKNSIITDVNGNLLDNIQLDHTSQVNTLNAAFFIQSLIDYSSNKDVLNDLSTSVKVQLYAQLFSTGLNTIYDSIQLVNLISNAVNDTINVLPTITEGIPIVSTILDGINLGAAIKELLDEHDPLLKKELEAKVGVLAINMSLSIAATVASIVGIGAEVTIFLLPIAGISAGIPSLVNNELILHDKATSVVNYFNHLSESKKYGPLKTEDDKILVPIDDLVISEIDFNNNSIKLGTCNILAMEGGSGHTVTGNIDHFFSSPSISSHIPSLSIYSAIGIETENLDFSKKIMMLPNAPSRVFWWETGAVPGLRSLENDGTRLLDSIRDLYPGKFYWRFYAFFDYAITTLKPVYEDTNIKIKLDKDTRNFIMPTITTNEIRNKLSYSFDGAGGTYSLLLSSYPISTNINLSKDDLWIFNIDNEVREISIENGTIKKGKLIKDVLSKIDINKNKLIIGNQTIDFSGDIDNKDRYIFLTCELDDKISLIIEINLVAKSYSLLLSGDKNYLISNLSNTIEKINTLGLDSKNIAYNYTDESNNKYFGAISKTSQKSIIHYKKDSKNILEFYNDSTLEFNSKDFIAEDINVFMKDDVNTITGKYYVDNNTDKSIDFSISLVSKNQVKVNGLYLNESVYSSYLDFVKNSDGHHNTSNFMNLFLDNISFWKLFGFENINFVIDKYFTLVGKTNLGYVEFICDNNKNIDIYFGEWKTSSSKSTIFSGNGRNVVVEPIYNPDTGEDISTSLDFSYEPLYGIDRYINKVLIAPDLYTSLININTNYYSNEYYPEIIVLNPNTFHKKVNINLDSSSFEYKWSTEGSDFILVRYLEESNKKILQKIRIKGILSNTQSFNKMSIDFKDIKKLSLGYIMSNFKSFNSENELDRDHLGFKIIDNKTYYYDEDSKLVKGLININNSLFYFDPIEFNLVTGWQTINGKKYYFDINTGAALTSYKIINGKHFYFNNDGVMQLGVFKGPDGFEYFAPANTQNNNIEGQAIVYQSKFLTLNGKKYYFDNNSKAVTGWRIINNEKYYFNPNNAIAAVGLQVIDNNKYYFNPDTAIISKGWQTVNGSRYYFDTDTAIAFNGYKTIDGKHFYFDSDCVVKIGVFSTSNGFEYFAPANTYNNNIEGQAIVYQSKFLTLNGKKYYFDNNSKAVTGWQTIDSKKYYFNTNTAEAATGWQTIDGKKYYFNTNTAEAATGWQTIDGKKYYFNTNTAIASTGYTIINGKHFYFNTDGIMQIGVFKGPNGFEYFAPANTDANNIEGQAILYQNEFLTLNGKKYYFGSDSKAVTGWRIINNKKYYFNPNNAIAAIHLCTINNDKYYFSYDGILQNGYITIERNNFYFDANNESKMVTGVFKGPNGFEYFAPANTHNNNIEGQAIVYQNKFLTLNGKKYYFDNDSKAVTGWQTIDGKKYYFNLNTAEAATGWQTIDGKKYYFNLNTAEAATGWQTIDGKKYYFNTNTFIASTGYTSINGKHFYFNTDGIMQIGVFKGPNGFEYFAPANTDANNIEGQAILYQNKFLTLNGKKYYFGSDSKAVTGLRTIDGKKYYFNTNTAVAVTGWQTINGKKYYFNTNTSIASTGYTIISGKHFYFNTDGIMQIGVFKGPDGFEYFAPANTDANNIEGQAIRYQNRFLYLHDNIYYFGNNSKAATGWVTIDGNRYYFEPNTAMGANGYKTIDNKNFYFRNGLPQIGVFKGSNGFEYFAPANTDANNIEGQAIRYQNRFLHLLGKIYYFGNNSKAVTGWQTINGKVYYFMPDTAMAAAGGLFEIDGVIYFFGVDGVKAPGIYG

SEQ ID NO: 93 - protein, 2710 aa, Clostridium difficile
MSLISKEELIKLAYSIRPRENEYKTILTNLDEYNKLTTNNNENKYLQLKKLNESIDVFMNKYKNSSRNRALSNLKKDILKEVILIKNSNTSPVEKNLHFVWIGGEVSDIALEYIKQWADINAEYNIKLWYDSEAFLVNTLKKAIVESSTTEALQLLEEEIQNPQFDNMKFYKKRMEFIYDRQKRFVNYYKSQINKPTVPTIDDIIKSHLVSEYNRDETLLESYRTNSLRKINSNHGIDIRANSLFTEQELLNIYSQELLNRGNLAAASDIVRLLALKNFGGVYLDVDMLPGIHSDLFKTISRPSSIGLDRWEMIKLEAIMKYKKYINNYTSENFDKLDQQLKDNFKLIIESKSEKSEIFSKLENLNVSDLEIKIAFALGSVINQALISKQGSYLTNLVIEQVKNRYQFLNQHLNPAIESDNNFTDTTKIFHDSLFNSATAENSMFLTKIAPYLQVGFMPEARSTISLSGPGAYASAYYDFINLQENTIEKTLKASDLIEFKFPENNLSQLTEQEINSLWSFDQASAKYQFEKYVRDYTGGSLSEDNEVDFNKNTALDKNYLLNNKIPSNNVEEAGSKNYVHYIIQLQGDDISYEATCNLFSKNPKNSIIIQRNMNESAKSYFLSDDGESILELNKYRIPERLKNKEKVKVTFIGHGKDEFNTSEFARLSVDSLSNEISSFLDTIKLDISPKNVEVNLLGCNMFSYDFNVEETYPGKLLLSIMDKITSTLPDVNKDSITIGANQYEVRINSEGRKELLAHSGKWINKEEAIMSDLSSKEYIFFDSIDNKLKAKSKNIPGLASISEDIKTLLLDTSVSPDTKFILNNLKLNIESSVGDYIYYEKLEPVKNIIHNSIDDLIDEFNLLENVSDELYELKKLNNLDEKYLISFEDISKNNSTYSVRFINKSNGESVYVETEKEIFSKYSEHITKEISTIKNSIITDVNGNLLDNIQLDHTSQVNTLNAAFFIQSLIDYSSNKDLLNDLSTSVKVQLYAQLFSTGLNTIYDSIQLVNLISNAVNDTINVLPTITEGIPIVSTILDGINLGAAIKELLDEHDPLLKKELEAKVGVLAINMSLSIAATVASIVGIGAEVTIFLLPIAGISAGIPSLVNNELILHDKATSVVNYFNHLSESKEYGPLKTEDDKILVPIDDLVISEIDFNNNAIKLGTCNILAMEGGSGHTVTGNIDHFFSSPSISSHIPSLSIYSAIGIKTENLDFSKKIMMLPNAPSRVFWWETGAVPGLRSLENNGTKLLDSIRDLYPGKFYWRFYAFFDYAITTLKPVYEDTNIKIKLDKDTRNFIMPTITTNEIRNKLSYSFDGAGGTYSLLLSSYPISTNINLSKDDLWIFNIDNEVREISIENGTIKKGKLIKDVLSKIDINKNKLIIGNQTIDFSGDIDNKDRYIFLTCELDDKISLIIEINLVAKSYSLLLSGDKNYLISNLSNTIEKINTLGLDSKNIAYNYTDESNNKYFGAISKTSQKSIIHYKKDSKNILEFYNGSTLEFNSKDFIAEDINVFMKDDINTITGKYYVDNNTDKSIDFSISLVSKNQAKVNGLYLNESVYSSYLDFVKNADGHHNTSNFMNLFLDNISFWKLFGFENINFVVDKYFTLVGKTNLGYVEFICDNNKNIDIYFGEWKTSSSKSTIFSGNGRNVVVEPIYNPDTGEDISTSLDFSYEPLYGIDRYINKVLIAPDLYTSLININTNYYSNEYYPEIIVLNPNTFHKKVNINLDSSSFEYKWSTEGSDFILVRYLEESNKKILQKIRIKGILSNTQSFNKMSIDFKDIKKLSLVYIMSNFKSFNSENELDRDHLGFKIIDNKTYYYDEASKLVKGLININNSLFYFDPIESNLVTGWQTINGKKYYFDINTGAALTSYKIINGKHFYFNNNGVMQLGVFKGPDRFEYFAPANTQNNNIEGQAIVYQSKFLTLNGKKYYFDNDSKAVTGWRIINNEKYYFNPNNAIAAVGLQVIDNNKYYFNPDTAIISKGWQTVNGSRYYFDTDTAIAFNGYKTIDGKHFYFDSDCVVKIGVFSGSNGFEYFAPANTYNNNIEGQAIVYQSKFLTLNGKKYYFDNNSKAVTGWQTIDSKKYYFNTNTAEAATGWQTIDGKKYYFNTNTAEVATGWQTIDGKKYYFNTNTSIASTGYTIINGKHFYFNTDGIMQIGVFKGPDGFEYFAPANTDANNIEGQAILYQNKFLTLNGKKYYFASDSKAVTGWRIINNKKYYFNPNNAIAATHLYTINNDKYYFSYDGILQNGYITIERNNFYFDANNESKMVTGVFKGPNGFEYFAPANTHNNNIEGQAIVYQNKFLTLNGKKYYFDNDSKAVTGWQTIDGKKYYFNLNTAVAVTGWQTIDGKKYYFNTNTAETATGWQTIDGKKYYFNTNTSIASTGYTIINGKHFYFNTDGIMQIGVFKGPDGFEYFAPANTDANNIEGQAILYQNKFLTLNGKKYYFASDSKAVTGLRTIDGKKYYFNTNTAEAATGWQTIDGKKYYFNTNTSIASTGYTIINDKHFYFNTDGIMQIGVFKGPDGFEYFAPANTDANNIEGQAIRYQNRFLYLHDNIYYFGNNSKAATGWVTIDGRRYYFEPNTAIGANGYKIIDNKNFYFRNGLPQIGVFKGPNGFEYFAPANTDANNIDGQAIRYQNRFLHLLGNIYYFGNNSKAVTGWQTINGNMYYFMPDTAMAAAGGLFEIDGVIYFFGVDGVKAPGIYG

SEQ ID NO: 94 - protein, 2710 aa, Clostridium difficile; identical to SEQ ID NO: 92

SEQ ID NO: 95 - protein, 2710 aa, Clostridium difficile
MSLISKEELIKLAYSIRPRENEYKTILTNLDEYNKLTTNNNENKYLQLKKLNESIDVFMNKYKNSSRNRALSNLKKDILKEVILIKNSNTSPVEKNLHFVWIGGEVSDIALEYIKQWADINAEYNIKLWYDSEAFLVNTLKKAIVESSTTEALQLLEEEIQNPQFDNMKFYKKRMEFIYDRQKRFVNYYKSQINKPTVPTIDDIIKSHLVSEYNRDETLLESYRTNSLRKINSNHGIDIRANSLFTEQELLNIYSQELLNRGNLAAASDIVRLLALKNFGGVYLDVDMLPGIHSDLFKTISRPSSIGLDRWEMIKLEAIMKYKKYINNYTSENFDKLDQQLKDNFKLIIESKSEKSEIFSKLENLNVSDLEIKIAFALGSVINQALISKQGSYLTNLVIEQVKNRYQFLNQHLNPAIESDNNFTDTTKIFHDSLFNSATAENSMFLTKIAPYLQVGFMPEARSTISLSGPGAYASAYYDFINLQENTIEKTLKASDLIEFKFPENNLSQLTEQEINSLWSFDQASAKYQFEKYVRDYTGGSLSEDNEVDFNKNTALDKNYLLNNKIPSNNVEEAGSKNYVHYIIQLQGDDISYEATCNLFSKNPKNSIIIQRNMNESAKSYFLSDDGESILELNKYRIPERLKNKEKVKVTFIGHGKDEFNTSEFARLSVDSLSNEISSFLDTIKLDISPKNVEVNLLGCNMFSYDFNVEETYPGKLLLSIMDKITSTLPDVNKDSITIGANQYEVRINSEGRKELLAHSGKWINKEEAIMSDLSSKEYIFFDSIDNKLKAKSKNIPGLASISEDIKTLLLDTSVSPDTKFILNNLKLNIESSVGDYIYYEKLEPVKNIIHNSIDDLIDEFNLLENVSDELYELKKLNNLDEKYLISFEDISKNNSTYSVRFINKSNGESVYVETEKEIFSKYSEHITKEISTIKNSIITDVNGNLLDNIQLDHTSQVNTLNAAFFIQSLIDYSSNKDLLNDLSTSVKVQLYAQLFSTGLNTIYDSIQLVNLISNAVNDTINVLPTITEGIPIVSTILDGINLGAAIKELLDEHDPLLKKELEAKVGVLAINMSLSIAATVASIVGIGAEVTIFLLPIAGISAGIPSLVNNELILHDKATSVVNYFNHLSESKEYGPLKTEDDKILVPIDDLVISEIDFNNNAIKLGTCNILAMEGGSGHTVTGNIDHFFSSPSISSHIPSLSIYSAIGIKTENLDFSKKIMMLPNAPSRVFWWETGAVPGLRSLENNGTKLLDSIRDLYPGKFYWRFYAFFDYAITTLKPVYEDTNIKIKLDKDTRNFIMPTITTNEIRNKLSYSFDGAGGTYSLLLSSYPISTNINLSKDDLWIFNIDNEVREISIENGTIKKGKLIKDVLSKIDINKNKLIIGNQTIDFSGDIDNKDRYIFLTCELDDKISLIIEINLVAKSYSLLLSGDKNYLISNLSNTIEKINTLGLDSKNIAYNYTDESNNKYFGAISKTSQKSIIHYKKDSKNILEFYNGSTLEFNSKDFIAEDINVFMKDDINTITGKYYVDNNTDKSIDFSISLVSKNQAKVNGLYLNESVYSSYLDFVKNADGHHNTSNFMNLFLDNISFWKLFGFENINFVVDKYFTLVGKTNLGYVEFICDNNKNIDIYFGEWKTSSSKSTIFSGNGRNVVVEPIYNPDTGEDISTSLDFSYEPLYGIDRYINKVLIAPDLYTSLININTNYYSNEYYPEIIVLNPNTFHKKVNINLDSSSFEYKWSTEGSDFILVRYLEESNKKILQKIRIKGILSNTQSFNKMSIDFKDIKKLSLVYIMSNFKSFNSENELDRDHLGFKIIDNKTYYYDEASKLVKGLININNSLFYFDPIESNLVTGWQTINGKKYYFDINTGAALTSYKIINGKHFYFNNNGVMQLGVFKGPDRFEYFAPANTQNNNIEGQAIVYQSKFLTLNGKKYYFDNDSKAVTGWRIINNEKYYFNPNNAIAAVGLQVIDNNKYYFNPDTAIISKGWQTVNGSRYYFDTDTAIAFNGYKTIDGKHFYFDSDCVVKIGVFSGSNGFEYFAPANTYNNNIEGQAIVYQSKFLTLNGKKYYFDNNSKAVTGWQTIDSKKYYFNTNTAEAATGWQTIDGKKYYFNTNTAEVATGWQTIDGKKYYFNTNTSIASTGYTIINGKHFYFNTDGIMQIGVFKGPDGFEYFAPANTDANNIEGQAILYQNKFLTLNGKKYYFASDSKAVTGWRIINNKKYYFNPNNAIAATHLYTINNDKYYFSYDGILQNGYITIERNNFYFDANNESKMVTGVFKGPNGFEYFAPANTHNNNIEGQAIVYQNKFLTLNGKKYYFDNDSKAVTGWQTIDGKKYYFNLNTAVAVTGWQTIDGKKYYFNTNTAEAATGWQTIDGKKYYFNTNTSIASTGYTIINGKHFYFNTDGIMQIGVFKGPDGFEYFAPANTDANNIEGQAILYQNKFLTLNGKKYYFASDSKAVTGLRTIDGKKYYFNTNTAEAATGWQTIDGKKYYFNTNTSIASTGYTIINDKHFYFNTDGIMQIGVFKGPDGFEYFAPANTDANNIEGQAIRYQNRFLYLHDNIYYFGNNSKAATGWVTIDGRRYYFEPNTAIGANGYKIIDNKNFYFRNGLPQIGVFKGPNGFEYFAPANTDANNIDGQAIRYQNRFLHLLGNIYYFGNNSKAVTGWQTINGNMYYFMPDTAMAAAGGLFEIDGVIYFFGVDGVKAPGIYG

SEQ ID NO: 96 - protein, 2710 aa, Clostridium difficile; identical to SEQ ID NO: 15

SEQ ID NO: 97 - protein, 2710 aa, Clostridium difficile
MSLISKEELIKLAYSIRPRENEYKTILTNLDEYNKLTTNNNENKYLQLKKLNESIDVFMNKYKTSSRNRALSNLKKDILKEVILIKNSNTSPVEKNLHFVWIGGEVSDIALEYIKQWADINAEYNIKLWYDSEAFLVNTLKKAIVESSTTEALQLLEEEIQNPQFDNMKFYKKRMEFIYDRQKRFINYYKSQINKPTVPTIDDIIKSHLVSEYNRDETVLESYRTNSLRKINSNHGIDIRANSLFTEQELLNIYSQELLNRGNLAAASDIVRLLALKNFGGVYLDVDMLPGIHSDLFKTISRPSSIGLDRWEMIKLEAIMKYKKYINNYTSENFDKLDQQLKDNFKLIIESKSEKSEIFSKLENLNVSDLEIKIAFALGSVINQALISKQGSYLTNLVIEQVKNRYQFLNQHLNPAIESDNNFTDTTKIFHDSLFNSATAENSMFLTKIAPYLQVGFMPEARSTISLSGPGAYASAYYDFINLQENTIEKTLKASDLIEFKFPENNLSQLTEQEINSLWSFDQASAKYQFEKYVRDYTGGSLSEDNGVDFNKNTALDKNYLLNNKIPSNNVEEAGSKNYVHYIIQLQGDDISYEATCNLFSKNPKNSIIIQRNMNESAKSYFLSDDGESILELNKYRIPERLKNKEKVKVTFIGHGKDEFNTSEFARLSVDSLSNEISSFLDTIKLDISPKNVEVNLLGCNMFSYDFNVEETYPGKLLLSIMDKITSTLPDVNKNSITIGANQYEVRINSEGRKELLAHSGKWINKEEAIMSDLSSKEYIFFDSIDNKLKAKSKNIPGLASISEDIKTLLLDASVSPDTKFILNNLKLNIESSIGDYIYYEKLEPVKNIIHNSIDDLIDEFNLLENVSDELYELKKLNNLDEKYLISFEDISKNNSTYSVRFINKSNGESVYVETEKEIFSKYSEHITKEISTIKNSIITDVNGNLLDNIQLDHTSQVNTLNAAFFIQSLIDYSSNKDVLNDLSTSVKVQLYAQLFSTGLNTIYDSIQLVNLISNAVNDTINVLPTITEGIPIVSTILDGINLGAAIKELLDEHDPLLKKELEAKVGVLAINMSLSIAATVASIVGIGAEVTIFLLPIAGISAGIPSLVNNELILHDKATSVVNYFNHLSESKKYGPLKTEDDKILVPIDDLVISEIDFNNNSIKLGTCNILAMEGGSGHTVTGNIDHFFSSPSISSHIPSLSIYSAIGIETENLDFSKKIMMLPNAPSRVFWWETGAVPGLRSLENNGTKLLDSIRDLYPGKFYWRFYAFFDYAITTLKPVYEDTNIKIKLDKDTRNFIMPTITTNEIRNKLSYSFDGAGGTYSLLLSSYPISTNINLSKDDLWIFNIDNEVREISIENGTIKKGKLIKDVLSKIDINKNKLIIGNQTIDFSGDIDNKDRYIFLTCELDDKISLIIEINLVAKSYSLLLSGDKNYLISNLSNTIEKINTLGLDSKNIAYNYTDESNNKYFGAISKTSQKSIIHYKKDSKNILEFYNGSTLEFNSKDFIAEDINVFMKDDINTITGKYYVDNNTDKSIDFSISLVSKNQVKVNGLYLNESVYSSYLDFVKNSDGHHNTSNFMNLFLDNISFWKLFGFENINFVIDKYFTLVGKTNLGYVEFICDNNKNIDIYFGEWKTSSSKSTIFSGNGRNVVVEPIYNPDTGEDISTSLDFSYEPLYGIDRYINKVLIAPDLYTSLININTNYYSNEYYPEIIVLNPNTFHKKVNINLDSSSFEYKWSTEGSDFILVRYLEESNKKILQKIRIKGILSNTQSFNKMSIDFKDIKKLSLGYIMSNFKSFNSENELDRDHLGFKIIDNKTYYYDEDSKLVKGLININNSLFYFDPIEFNLVTGWQTINGKKYYFDINTGAALTSYKIINGKHFYFNNDGVMQLGVFKGPDGFEYFAPANTQNNNIEGQAIVYQSKFLTLNGKKYYFDNDSKAVTGWRIINNEKYYFNPNNAIAAVGLQVIDNNKYYFNPDTAIISKGWQTVNGSRYYFDTDTAIAFNGYKTIDGKHFYFDSDCVVKIGVFSTSNGFEYFAPANTYNNNIEGQAIVYQSKFLTLNGKKYYFDDNSKAVTGWQTIDSKKYYFNTNTAEAATGWQTIDGKKYYFNTNTAEAATGWQTIDGKKYYFNTNTAIASTGYTIINGKHFYFNTDGIMQIGVFKGPNGFEYFAPANTDANNIEGQAILYQNEFLTLNGKKYYFGSDSKAVTGWRIINNKKYYFNPNNAIAAIHLCTINNDKYYFSYDGILQNGYITIERNNFYFDANNESKMVTGVFKGPNGFEYFAPANTYNNNIEGQAIVYQNKFLTLNGKKYYFDNDSKAVTGWQTIDGKKYYFNLNTAEAATGWQTIDGKKYYFNLNTAEAATGWQTIDGKKYYFNTNTFIASTGYTSINGKHFYFNTDGIMQIGVFKGPNGFEYFAPANTHNNNIEGQAILYQNKFLTLNGKKYYFGSDSKAVTGLRTIDGKKYYFNTNTAVAVTGWQTINGKKYYFNTNTSIASTGYTIISGKHFYFNTDGIMQIGVFKGPDGFEYFAPANTDANNIEGQAIRYQNRFLYLHDNIYYFGNNSKAATGWVTIDGNRYYFEPNTAMGANGYKTIDNKNFYFRNGLPQIGVFKGSNGFEYFAPANTDANNIEGQAIRYQNRFLHLLGKIYYFGNNSKAVTGWQTINGKVYYFMPDTAMAAAGGLFEIDGVIYFFGVDGVKAPGIYG

SEQ ID NO: 98 - protein, 2710 aa, Clostridium difficile
MSLISKEELIKLAYSIRPRENEYKTILTNLDEYNKLTTNNNENKYLQLKKLNESIDVFMNKYKTSSRNRALSNLKKDILKEVILIKNSNTSPVEKNLHFVWIGGEVSDIALEYIKQWADINAEYNIKLWYDSEAFLVNTLKKAIVESSTTEALQLLEEEIQNPQFDNMKFYKKRMEFIYDRQKRFINYYKSQINKPTVPTIDDIIKSHLVSEYNRDETVLESYRTNSLRKINSNHGIDIRANSLFTEQELLNIYSQELLNRGNLAAASDIVRLLALKNFGGVYLDVDMLPGIHSDLFKTISRPSSIGLDRWEMIKLEAIMKYKKYINNYTSENFDKLDQQLKDNFKLIIESKSEKSEIFSKLENLNVSDLEIKIAFALGSVINQALISKQGSYLTNLVIEQVKNRYQFLNQHLNPAIESDNNFTDTTKIFHDSLFNSATAENSMFLTKIAPYLQVGFMPEARSTISLSGPGAYASAYYDFINLQENTIEKTLKASDLIEFKFPENNLSQLTEQEINSLWSFDQASAKYQFEKYVRDYTGGSLSEDNGVDFNKNTALDKNYLLNNKIPSNNVEEAGSKNYVHYIIQLQGDDISYEATCNLFSKNPKNSIIIQRNMNESAKSYFLSDDGESILELNKYRIPERLKNKEKVKVTFIGHGKDEFNTSEFARLSVDSLSNEISSFLDTIKLDISPKNVEVNLLGCNMFSYDFNVEETYPGKLLLSIMDKITSTLPDVNKNSITIGANQYEVRINSEGRKELLAHSGKWINKEEAIMSDLSSKEYIFFDSIDNKLKAKSKNIPGLASISEDIKTLLLDASVSPDTKFILNNLKLNIESSIGDYIYYEKLEPVKNIIHNSIDDLIDEFNLLENVSDELYELKKLNNLDEKYLISFEDISKNNSTYSVRFINKSNGESVYVETEKEIFSKYSEHITKEISTIKNSIITDVNGNLLDNIQLDHTSQVNTLNAAFFIQSLIDYSSNKDVLNDLSTSVKVQLYAQLFSTGLNTIYDSIQLVNLISNAVNDTINVLPTITEGIPIVSTILDGINLGAAIKELLDEHDPLLKKELEAKVGVLAINMSLSIAATVASIVGIGAEVTIFLLPIAGISAGIPSLVNNELILHDKATSVVNYFNHLSESKKYGPLKTEDDKILVPIDDLVISEIDFNNNSIKLGTCNILAMEGGSGHTVTGNIDHFFSSPSISSHIPSLSIYSAIGIETENLDFSKKIMMLPNAPSRVFWWETGAVPGLRSLENDGTRLLDSIRDLYPGKFYWRFYAFFDYAITTLKPVYEDTNIKIKLDKDTRNFIMPTITTNEIRNKLSYSFDGAGGTYSLLLSSYPISTNINLSKDDLWIFNIDNEVREISIENGTIKKGKLIKDVLSKIDINKNKLIIGNQTIDFSGDIDNKDRYIFLTCELDDKISLIIEINLVAKSYSLLLSGDKNYLISNLSNTIEKINTLGLDSKNIAYNYTDESNNKYFGAISKTSQKSIIHYKKDSKNILEFYNDSTLEFNSKDFIAEDINVFMKDDINTITGKYYVDNNTDKSIDFSISLVSKNQVKVNGLYLNESVYSSYLDFVKNSDGHHNTSNFMNLFLDNISFWKLFGFENINFVIDKYFTLVGKTNLGYVEFICDNNKNIDIYFGEWKTSSSKSTIFSGNGRNVVVEPIYNPDTGEDISTSLDFSYEPLYGIDRYINKVLIAPDLYTSLININTNYYSNEYYPEIIVLNPNTFHKKVNINLDSSSFEYKWSTEGSDFILVRYLEESNKKILQKIRIKGILSNTQSFNKMSIDFKDIKKLSLGYIMSNFKSFNSENELDRDHLGFKIIDNKTYYYDEDSKLVKGLININNSLFYFDPIEFNLVTGWQTINGKKYYFDINTGAALTSYKIINGKHFYFNNDGVMQLGVFKGPDGFEYFAPANTQNNNIEGQAIVYQSKFLTLNGKKYYFDNNSKAVTGWRIINNEKYYFNPNNAIAAVGLQVIDNNKYYFNPDTAIISKGWQTVNGSRYYFDTDTAIAFNGYKTIDGKHFYFDSDCVVKIGVFSTSNGFEYFAPANTYNNNIEGQAIVYQSKFLTLNGKKYYFDNNSKAVTGWQTIDSKKYYFNTNTAEAATGWQTIDGKKYYFNTNTAEAATGWQTIDGKKYYFNTNTAIASTGYTIINGKHFYFNTDGIMQIGVFKGPNGFEYFAPANTDANNIEGQAILYQNEFLTLNGKKYYFGSDSKAVTGWRIINNKKYYFNPNNAIAAIHLCTINNDKYYFSYDGILQNGYITIERNNFYFDANNESKMVTGVFKGPNGFEYFAPANTHNNNIEGQAIVYQNKFLTLNGKKYYFDNDSKAVTGWQTIDGKKYYFNLNTAEAATGWQTIDGKKYYFNLNTAEAATGWQTIDGKKYYFNTNTFIASTGYTSINGKHFYFNTDGIMQIGVFKGPNGFEYFAPANTHNNNIEGQAILYQNKFLTLNGKKYYFGSDSKAVTGLRTIDGKKYYFNTNTAVAVTGWQTINGKKYYFNTNTSIASTGYTIISGKHFYFNTDGIMQIGVFKGPDGFEYFAPANTDANNIEGQAIRYQNRFLYLHDNIYYFGNNSKAATGWVTIDGNRYYFEPNTAMGANGYKTIDNKNFYFRNGLPQIGVFKGSNGFEYFAPANTDANNIEGQAIRYQNRFLHLLGKIYYFGNNSKAVTGWQTINGKVYYFMPDTAMAAAGGLFEIDGVIYFFGVDGVKAPGIYG

SEQ ID NO: 99 - protein, 2710 aa, Clostridium difficile; identical to SEQ ID NO: 95

SEQ ID NO: 100 - protein, 2710 aa, Clostridium difficile
MSLISKEELIKLAYSIRPRENEYKTILTNLDEYNKLTTNNNENKYLQLKKLNESIDVFMNKYKTSSRNRALSNLKKDILKEVILIKNSNTSPVEKNLHFVWIGGEVSDIALEYIKQWADINAEYNIKLWYDSEAFLVNTLKKAIVESSTTEALQLLEEEIQNPQFDNMKFYKKRMEFIYDRQKRFINYYKSQINKPTVPTIDDIIKSHLVSEYNRDETVLESYRTNSLRKINSNHGIDIRANSLFTEQELLNIYSQELLNRGNLAAASDIVRLLALKNFGGVYLDVDMLPGIHSDLFKTISRPSSIGLDRWEMIKLEAIMKYKKYINNYTSENFDKLDQQLKDNFKLIIESKSEKSEIFSKLENLNVSDLEIKIAFALGSVINQALISKQGSYLTNLVIEQVKNRYQFLNQHLNPAIESDNNFTDTTKIFHDSLFNSATAENSMFLTKIAPYLQVGFMPEARSTISLSGPGAYASAYYDFINLQENTIEKTLKASDLIEFKFPENNLSQLTEQEINSLWSFDQASAKYQFEKYVRDYTGGSLSEDNGVDFNKNTALDKNYLLNNKIPSNNVEEAGSKNYVHYIIQLQGDDISYEATCNLFSKNPKNSIIIQRNMNESAKSYFLSDDGESILELNKYRIPERLKNKEKVKVTFIGHGKDEFNTSEFARLSVDSLSNEISSFLDTIKLDISPKNVEVNLLGCNMFSYDFNVEETYPGKLLLSIMDKITSTLPDVNKNSITIGANQYEVRINSEGRKELLAHSGKWINKEEAIMSDLSSKEYIFFDSIDNKLKAKSKNIPGLASISEDIKTLLLDASVSPDTKFILNNLKLNIESSIGDYIYYEKLEPVKNIIHNSIDDLIDEFNLLENVSDELYELKKLNNLDEKYLISFEDISKNNSTYSVRFINKSNGESVYVETEKEIFSKYSEHITKEISTIKNSIITDVNGNLLDNIQLDHTSQVNTLNAAFFIQSLIDYSSNKDVLNDLSTSVKVQLYAQLFSTGLNTIYDSIQLVNLISNAVNDTINVLPTITEGIPIVSTILDGINLGAAIKELLDEHDPLLKKELEAKVGVLAINMSLSIAATVASIVGIGAEVTIFLLPIAGISAGIPSLVNNELILHDKATSVVNYFNHLSESKKYGPLKTEDDKILVPIDDLVISEIDFNNNSIKLGTCNILAMEGGSGHTVTGNIDHFFSSPSISSHIPSLSIYSAIGIETENLDFSKKIMMLPNAPSRVFWWETGAVPGLRSLENDGTRLLDSIRDLYPGKFYWRFYAFFDYAITTLKPVYEDTNIKIKLDKDTRNFIMPTITTNEIRNKLSYSFDGAGGTYSLLLSSYPISTNINLSKDDLWIFNIDNEVREISIENGTIKKGKLIKDVLSKIDINKNKLIIGNQTIDFSGDIDNKDRYIFLTCELDDKISLIIEINLVAKSYSLLLSGDKNYLISNLSNTIEKINTLGLDSKNIAYNYTDESNNKYFGAISKTSQKSIIHYKKDSKNILEFYNDSTLEFNSKDFIAEDINVFMKDDINTITGKYYVDNNTDKSIDFSISLVSKNQVKVNGLYLNESVYSSYLDFVKNSDGHHNTSNFMNLFLDNISFWKLFGFENINFVIDKYFTLVGKTNLGYVEFICDNNKNIDIYFGEWKTSSSKSTIFSGNGRNVVVEPIYNPDTGEDISTSLDFSYEPLYGIDRYINKVLIAPDLYTSLININTNYYSNEYYPEIIVLNPNTFHKKVNINLDSSSFEYKWSTEGSDFILVRYLEESNKKILQKIRIKGILSNTQSFNKMSIDFKDIKKLSLGYIMSNFKSFNSENELDRDHLGFKIIDNKTYYYDEDSKLVKGLININNSLFYFDPIEFNLVTGWQTINGKKYYFDINTGAALTSYKIINGKHFYFNNDGVMQLGVFKGPDGFEYFAPANTQNNNIEGQAIVYQSKFLTLNGKKYYFDNDSKAVTGWRIINNEKYYFNPNNAIAAVGLQVIDNNKYYFNPDTAIISKGWQTVNGSRYYFDTDTAIAFNGYKTIDGKHFYFDSDCVVKIGVFSTSNGFEYFAPANTYNNNIEGQAIVYQSKFLTLNGKKYYFDNNSKAVTGWQTIDSKKYYFNTNTAEAATGWQTIDGKKYYFNTNTAEAATGWQTIDGKKYYFNTNTAIASTGYTIINGKHFYFNTDGIMKIGVFKGPNGFEYFAPANTDANNIEGQAILYQNEFLTLNGKKYYFGSDSKAVTGWRIINNKKYYFNPNNAIAAIHLCTINNDKYYFSYDGILQNGYITIERNNFYFDANNESKMVTGVFKGPNGFEYFAPANTYNNNIEGQAIVYQNKFLTLNGKKYYFDNDSKAVTGWQTIDGKKYYFNLNTAEAATGWQTIDGKKYYFNLNTAEAATGWQTIDGKKYYFNTNTFIASTGYTSINGKHFYFNTDGIMQIGVFKGPNGFEYFAPANTHNNNIEGQAILYQNKFLTLNGKKYYFGSDSKAVTGLRTIDGKKYYFNTNTAVAVTGWQTINGKKYYFNTNTSIASTGYTIISGKHFYFNTDGIMQIGVFKGPDGFEYFAPANTDANNIEGQAIRYQNRFLYLHDNIYYFGNNSKAATGWVTIDGNRYYFEPNTAMGANGYKTIDNKNFYFRNGLPQIGVFKGSNGFEYFAPANTDANNIEGQAIRYQNRFLHLLGKIYYFGNNSKAVTGWQTINGKVYYFMPDTAMAAAGGLFEIDGVIYFFGVDGVKAPGIYG

SEQ ID NO: 101 - protein, 2710 aa, Clostridium difficile; identical to SEQ ID NO: 95

SEQ ID NO: 102 - protein, 2710 aa, Clostridium difficile
MSLISKEELIKLAYSIRPRENEYKTILTNLDEYNKLTTNNNENKYLQLKKLNESIDVFMNKYKNSSRNRALSNLKKDILKEVILIKNSNTSPVEKNLHFVWIGGEVSDIALEYIKQWADINAEYNIKLWYDSEAFLVNTLKKAIVESSTTEALQLLEEEIQNPQFDNTKFYKKRMEFIYDRQKRFINYYKSQINKPTVPTIDDIIKSHLVSEYNRDETLLESYRTNSLRKINSNHGIDIRANSLFTEQELLNIYSQELLNRGNLAAASDIVRLLALKNFGGVYLDVDMLPGIHSDLFKTISRPSSIGLDRWEMIKLEAIMKYKKYINNYTSENFDKLDQQLKDNFKLIIESKSEKSEIFSKLENLNVSDLEIKIAFALGSVINQALISKQGSYLTNLVIEQVKNRYQFLNQHLNPAIESDNNFTDTTKIFHDSLFNSATAENSMFLTKIAPYLQVGFMPEARSTISLSGPGAYASAYYDFINLQENTIEKTLKASDLIEFKFPENNLSQLTEQEINSLWSFDQASAKYQFEKYVRDYTGGSLSEDNGVDFNKNTALDKNYLLNNKIPSNNVEEAGSKNYVHYIIQLQGDDISYEATCNLFSKNPKNSIIIQRNMNESAKSYFLSDDGESILELNKYRIPERLKNKEKVKVTFIGHGKDEFNTSEFARLSVDSLSNEISSFLDTIKLDISPKNVEVNLLGCNMFSYDFNVEETYPGKLLLSIMDKITSTLPDVNKDSITIGANQYEVRINSEGRKELLAHSGKWINKEEAIMSDLSSKEYIFFDSIDNKLKAKSKNIPGLASISEDIKTLLLDASVSPDTKFILNNLKLNIESSIGDYIYYEKLEPVKNIIHNSIDDLIDEFNLLENVSDELYELKKLNNLDEKYLISFEDISKNNSTYSVRFINKSNGESVYVETEKEIFSKYSEHITKEISTIKNSIITDVNGNLLDNIQLDHTSQVNTLNAAFFIQSLIDYSSNKDVLNDLSTSVKVQLYAQLFSTGLNTIYDSIQLVNLISNAVNDTINVLPTITEGIPIVSTILDGINLGAAIKELLDEHDPLLKKELEAKVGVLAINMSLSIAATVASIVGIGAEVTIFLLPIAGISAGIPSLVNNELILHDKATSVVNYFNHLSESKKYGPLKTEDDKILVPIDDLVISEIDFNNNSIKLGTCNILAMEGGSGHTVTGNIDHFFSSPYISSHIPSLSVYSAIGIKTENLDFSKKIMMLPNAPSRVFWWETGAVPGLRSLENDGTKLLDSIRDLYPGKFYWRFYAFFDYAITTLKPVYEDTNTKIKLDKDTRNFIMPTITTDEIRNKLSYSFDGAGGTYSLLLSSYPISMNINLSKDDLWIFNIDNEVREISIENGTIKKGNLIEDVLSKIDINKNKLIIGNQTIDFSGDIDNKDRYIFLTCELDDKISLIIEINLVAKSYSLLLSGDKNYLISNLSNTIEKINTLGLDSKNIAYNYTDESNNKYFGAISKTSQKSIIHYKKDSKNILEFYNGSTLEFNSKDFIAEDINVFMKDDINTITGKYYVDNNTDKSIDFSISLVSKNQVKVNGLYLNESVYSSYLDFVKNSDGHHNTSNFMNLFLNNISFWKLFGFENINFVIDKYFTLVGKTNLGYVEFICDNNKNIDIYFGEWKTLSSKSTIFSGNGRNVVVEPIYNPDTGEDISTSLDFSYEPLYGIDRYINKVLIAPDLYTSLININTNYYSNEYYPEIIVLNPNTFHKKVNINLDSSSFEYKWSTEGSDFILVRYLEESNKKILQKIRIKGILSNTQSFNKMSIDFKDIKKLSLGYIMSNFKSFNSENELDRDHLGFKIIDNKTYYYDEDSKLVKGLININNSLFYFDPIESNLVTGWQTINGKKYYFDINTGAASTSYKIINGKHFYFNNNGVMQLGVFKGPDGFEYFAPANTQNNNIEGQAIVYQSKFLTLNGKKYYFDNDSKAVTGWRIINNEKYYFNPNNAIAAVGLQVIDNNKYYFNPDTAIISKGWQTVNGSRYYFDTDTAIAFNGYKTIDGKHFYFDSDCVVKIGVFSGSNGFEYFAPANTYNNNIEGQAIVYQSKFLTLNGKKYYFDNNSKAVTGWQTIDSKKYYFNTNTAEAATGWQTIDGKKYYFNTNTAEAATGWQTIDGKKYYFNTNTSIASTGYTIINGKHFYFNTDGIMQIGVFKGPNGFEYFAPANTDANNIEGQAILYQNKFLTLNGKKYYFGSDSKAITGWQTIDGKKYYFNPNNAIAATHLCTINNDKYYFSYDGILQNGYITIERNNFYFDANNESKMVTGVFKGPNGFEYFAPANTHNNNIEGQAIVYQNKFLTLNGKKYYFDNDSKAVTGWQTIDSKKYYFNLNTAVAVTGWQTIDGEKYYFNLNTAEAATGWQTIDGKRYYFNTNTYIASTGYTIINGKHFYFNTDGIMQIGVFKGPDGFEYFAPANTHNNNIEGQAILYQNKFLTLNGKKYYFGSDSKAVTGLRTIDGKKYYFNTNTAVAVTGWQTINGKKYYFNTNTYIASTGYTIISGKHFYFNTDGIMQIGVFKGPDGFEYFAPANTDANNIEGQAIRYQNRFLYLHDNIYYFGNDSKAATGWATIDGNRYYFEPNTAMGANGYKTIDNKNFYFRNGLPQIGVFKGPNGFEYFAPANTDANNIDGQAIRYQNRFLHLLGNIYYFGNNSKAVTGWQTINGKVYYFMPDTAMAAAGGLFEIDGVIYFFGVDGVKAPGIYG

SEQ ID NO: 103 - protein, 2710 aa, Clostridium difficile; identical to SEQ ID NO: 102

SEQ ID NO: 104 - protein, 2710 aa, Clostridium difficile; identical to SEQ ID NO: 102

SEQ ID NO: 105 - protein, 2710 aa, Clostridium difficile; identical to SEQ ID NO: 88

SEQ ID NO: 106 - protein, 2710 aa, Clostridium difficile; identical to SEQ ID NO: 92

SEQ ID NO: 107 - protein, 2710 aa, Clostridium difficile
MSLISKEELIKLAYSIRPRENEYKTILTNLDEYNKLTTNNNENKYLQLKKLNESIDVFMNKYKTSSRNRALSNLKKDILKEVILIKNSNTSPVEKNLHFVWIGGEVSDIALEYIKQWADINAEYNIKLWYDSEAFLVNTLKKAIVESSTTEALQLLEEEIQNPQFDNMKFYKKRMEFIYDRQKRFINYYKSQINKPTVPTIDDIIKSHLVSEYNRDETVLESYRTNSLRKINSNHGIDIRANSLFTEQELLNIYSQELLNRGNLAAASDIVRLLALKNFGGVYLDVDMLPGIHSDLFKTISRPSSIGLDRWEMIKLEAIMKYKKYINNYTSENFDKLDQQLKDNFKLIIESKSEKSEIFSKLENLNVSDLEIKIAFALGSVINQALISKQGSYLTNLVIEQVKNRYQFLNQHLNPAIESDNNFTDTTKIFHDSLFNSATAENSMFLTKIAPYLQVGFMPEARSTISLSGPGAYASAYYDFINLQENTIEKTLKASDLIEFKFPENNLSQLTEQEINSLWSFDQASAKYQFEKYVRDYTGGSLSEDNGVDFNKNTALDKNYLLNNKIPSNNVEEAGSKNYVHYIIQLQGDDISYEATCNLFSKNPKNSIIIQRNMNESAKSYFLSDDGESILELNKYRIPERLKNKEKVKVTFIGHGKDEFNTSEFARLSVDSLSNEISSFLDTIKLDISPKNVEVNLLGCNMFSYDFNVEETYPGKLLLSIMDKITSTLPDVNKNSITIGANQYEVRINSEGRKELLAHSGKWINKEEAIMSDLSSKEYIFFDSIDNKLKAKSKNIPGLASISEDIKTLLLDASVSPDTKFILNNLKLNIESSIGDYIYYEKLEPVKNIIHNSIDDLIDEFNLLENVSDELYELKKLNNLDEKYLISFEDISKNNSTYSVRFINKSNGESVYVETEKEIFSKYSEHITKEISTIKNSIITDVNGNLLDNIQLDHTSQVNTLNAAFFIQSLIDYSSNKDVLNDLSTSVKVQLYAQLFSTGLNTIYDSIQLVNLISNAVNDTINVLPTITEGIPIVSTILDGINLGAAIKELLDEHDPLLKKELEAKVGVLAINMSLSIAATVASIVGIGAEVTIFLLPIAGISAGIPSLVNNELILHDKATSVVNYFNHLSESKKYGPLKTEDDKILVPIDDLVISEIDFNNNSIKLGTCNILAMEGGSGHTVTGNIDHFFSSPSISSHIPSLSIYSAIGIETENLDFSKKIMMLPNAPSRVFWWETGAVPGLRSLENDGTRLLDSIRDLYPGKFYWRFYAFFDYAITTLKPVYEDTNIKIKLDKDTRNFIMPTITTNEIRNKLSYSFDGAGGTYSLLLSSYPISTNINLSKDDLWIFNIDNEVREISIENGTIKKGKLIKDVLSKIDINKNKLIIGNQTIDFSGDIDNKDRYIFLTCELDDKISLIIEINLVAKSYSLLLSGDKNYLISNLSNTIEKINTLGLDSKNIAYNYTDESNNKYFGAISKTSQKSIIHYKKDSKNILEFYNDSTLEFNSKDFIAEDINVFMKDDINTITGKYYVDNNTDKSIDFSISLVSKNQVKVNGLYLNESVYSSYLDFVKNSDGHHNTSNFMNLFLDNISFWKLFGFENINFVIDKYFTLVGKTNLGYVEFICDNNKNIDIYFGEWKTSSSKSTIFSGNGRNVVVEPIYNPDTGEDISTSLDFSYEPLYGIDRYINKVLIAPDLYTSLININTNYYSNEYYPEIIVLNPNTFHKKVNINLDSSSFEYKWSTEGSDFILVRYLEESNKKILQKIRIKGILSNTQSFNKMSIDFKDIKKLSLGYIMSNFKSFNSENELDRDHLGFKIIDNKTYYYDEDSKLVKGLININNSLFYFDPIEFNLVTGWQTINGKKYYFDINTGAALTSYKIINGKHFYFNNDGVMQLGVFKGPDGFEYFAPANTQNNNIEGQAIVYQSKFLTLNGKKYYFDNDSKAVTGWRIINNEKYYFNPNNAIAAVGLQVIDNNKYYFNPDTAIISKGWQTVNGSRYYFDTDTAIAFNGYKTIDGKHFYFDSDCVVKIGVFSTSNGFEYFAPANTYNNNIEGQAIVYQSKFLTLNGKKYYFDNNSKAVTGWQTIDSKKYYFNTNTAEAATGWQTIDGKKYYFNTNTAEAATGWQTIDGKKYYFNTNTAIASTGYTIINGKHFYFNTDGIMQIGVFKGPNGFEYFAPANTDANNIEGQAILYQNEFLTLNGKKYYFGSDSKAVTGWRIINNKKYYFNPNNAIAAIHLCTINNDKYYFSYDGILQNGYITIERNNFYFDANNESKMVTGVFKGPNGFEYFAPANTHNNNIEGQAIVYQNKFLTLNGKKYYFDNDSKAVTGWQTIDGKKYYFNLNTAEAATGWQTIDGKKYYFNLNTAEAATGWQTIDGKKYYFNTNTFIASTGYTSINGKHFYFNTDGIMQIGVFKGPNGFEYFAPANTDANNIEGQAILYQNKFLTLNGKKYYFGSDSKAVTGLRTIDGKKYYFNTNTAVAVTGWQTINGKKYYFNTNTSIASTGYTIISGKHFYFNTDGIMQIGVFKGPDGFEYFAPANTDANNIEGQAIRYQNRFLYLHDNIYYFGNNSKAATGWVTIDGNRYYFEPNTAMGANGYKTIDNKNFYFRNGLPQIGVFKGSNGFEYFAPANTDANNIEGQAIRYQNRFLHLLGKIYYFGNNSKAVTGWQTINGKVYYFMPDTAMAAAGGLFEIDGVIYFFGVDGVKAPGIYG

SEQ ID NO: 108 - protein, 2710 aa, Clostridium difficile; identical to SEQ ID NO: 88

SEQ ID NO: 109 - protein, 2710 aa, Clostridium difficile; identical to SEQ ID NO: 15

SEQ ID NO: 110 - protein, 2366 aa, Clostridium difficile; identical to SEQ ID NO: 21

SEQ ID NO: 111 - protein, 2366 aa, Clostridium difficile
MSLVNRKQLEKMANVRFRTQEDEYVAILDALEEYHNMSENTVVEKYLKLKDINSLTDIYIDTYKKSGRNKALKKFKEYLVTEVLELKNNNLTPVEKNLHFVWIGGQINDTAINYINQWKDVNSDYNVNVFYDSNAFLINTLKKTVVESAINDTLESFRENLNDPRFDYNKFFRKRMEIIYDKQKNFINYYKAQREENPELIIDDIVKTYLSNEYSKEIDELNTYIEESLNKITQNSGNDVRNFEEFKNGESFNLYEQELVERWNLAAASDILRISALKEIGGMYLDVDMLPGIQPDLFESIEKPSSVTVDFWEMTKLEAIMKYKEYIPEYTSEHFDMLDEEVQSSFESVLASKSDKSEIFSSLGDMEASPLEVKIAFNSKGIINQGLISVKDSYCSNLIVKQIENRYKILNNSLNPAISEDNDFNTTTNTFIDSIMAEANADNGRFMMELGKYLRVGFFPDVKTTINLSGPEAYAAAYQDLLMFKEGSMNIHLIEADLRNFEISKTNISQSTEQEMASLWSFDDARAKAQFEEYKRNYFEGSLGEDDNLDFSQNIVVDKEYLLEKISSLARSSERGYIHYIVQLQGDKISYEAACNLFAKTPYDSVLFQKNIEDSEIAYYYNPGDGEIQEIDKYKIPSIISDRPKIKLTFIGHGKDEFNTDIFAGFDVDSLSTEIEAAIDLAKEDISPKSIEINLLGCNMFSYSINVEETYPGKLLLKVKDKISELMPSISQDSIIVSANQYEVRINSEGRRELLDHSGEWINKEESIIKDISSKEYISFNPKENKITVKSKNLPELSTLLQEIRNNSNSSDIELEEKVMLTECEINVISNIDTQIVEERIEEAKNLTSDSINYIKDEFKLIESISDALCDLKQQNELEDSHFISFEDISETDEGFSIRFINKETGESIFVETEKTIFSEYANHITEEISKIKGTIFDTVNGKLVKKVNLDTTHEVNTLNAAFFIQSLIEYNSSKESLSNLSVAMKVQVYAQLFSTGLNTITDAAKVVELVSTALDETIDLLPTLSEGLPIIATIIDGVSLGAAIKELSETSDPLLRQEIEAKIGIMAVNLTTATTAIITSSLGVASGFSILLVPLAGISAGIPSLVNNELVLRDKATKVVDYFKHVSLVETEGVFTLLDDKIMMPQDDLVISEIDFNNNSIVLGKCEIWRMEGGSGHTVTDDIDHFFSAPSITYREPHLSIYDVLEVQKEELDLSKDLMVLPNAPNRVFAWETGWTPGLRSLENDGTKLLDRIRDNYEGEFYWRYFAFIADALITTLKPRYEDTNIRINLDSNTRSFIVPIITTEYIREKLSYSFYGSGGTYALSLSQYNMGINIELSESDVWIIDVDNVVRDVTIESDKIKKGDLIEGILSTLSIEENKIILNSHEINFSGEVNGSNGFVSLTFSILEGINAIIEVDLLSKSYKLLISGELKILMLNSNHIQQKIDYIGFNSELQKNIPYSFVDSEGKENGFINGSTKEGLFVSELPDVVLISKVYMDDSKPSFGYYSNNLKDVKVITKDNVNILTGYYLKDDIKISLSLTLQDEKTIKLNSVHLDESGVAEILKFMNRKGNTNTSDSLMSFLESMNIKSIFVNFLQSNIKFILDANFIISGTTSIGQFEFICDENDNIQPYFIKFNTLETNYTLYVGNRQNMIVEPNYDLDDSGDISSTVINFSQKYLYGIDSCVNKVVISPNIYTDEINITPVYETNNTYPEVIVLDANYINEKINVNINDLSIRYVWSNDGNDFILMSTSEENKVSQVKIRFVNVFKDKTLANKLSFNFSDKQDVPVSEIILSFTPSYYEDGLIGYDLGLVSLYNEKFYINNFGMMVSGLIYINDSLYYFKPPVNNLITGFVTVGDDKYYFNPINGGAASIGETIIDDKNYYFNQSGVLQTGVFSTEDGFKYFAPANTLDENLEGEAIDFTGKLIIDENIYYFDDNYRGAVEWKELDGEMHYFSPETGKAFKGLNQIGDYKYYFNSDGVMQKGFVSINDNKHYFDDSGVMKVGYTEIDGKHFYFAENGEMQIGVFNTEDGFKYFAHHNEDLGNEEGEEISYSGILNFNNKIYYFDDSFTAVVGWKDLEDGSKYYFDEDTAEAYIGLSLINDGQYYFNDDGIMQVGFVTINDKVFYFSDSGIIESGVQNIDDNYFYIDDNGIVQIGVFDTSDGYKYFAPANTVNDNIYGQAVEYSGLVRVGEDVYYFGETYTIETGWIYDMENESDKYYFNPETKKACKGINLIDDIKYYFDEKGIMRTGLISFENNNYYFNENGEMQFGYINIEDKMFYFGEDGVMQIGVFNTPDGFKYFAHQNTLDENFEGESINYTGWLDLDEKRYYFTDEYIAATGSVIIDGEEYYFDPDTAQLVISE

SEQ ID NO: 112 - protein, 2366 aa, Clostridium difficile; identical to SEQ ID NO: 21

SEQ ID NO: 113 - protein, 2366 aa, Clostridium difficile; identical to SEQ ID NO: 111

SEQ ID NO: 114 - protein, 2366 aa, Clostridium difficile
MSLVNRKQLEKMANVRFRTQEDEYVAILDALEEYHNMSENTVVEKYLKLKDINSLTDIYIDTYKKSGRNKALKKFKEYLVTEVLELKNNNLTPVEKNLHFVWIGGQINDTAINYINQWKDVNSDYNVNVFYDSNAFLINTLKKTVVESAINDTLESFRENLNDPRFDYNKFFRKRMEIIYDKQKNFINYYKAQREENPELIIDDIVKTYLSNEYSKEIDELNTYIEESLNKITQNSGNDVRNFEEFKNGESFNLYEQELVERWNLAAASDILRISALKEIGGMYLDVDMLPGIQPDLFESIEKPSSVTVDFWEMTKLEAIMKYKEYIPEYTSEHFDMLDEEVQSSFESVLASKSDKSEIFSSLGDMEASPLEVKIAFNSKGIINQGLISVKDSYCSNLIVKQIENRYKILNNSLNPAISEDNDFNTTTNTFIDSIMAEANADNGRFMMELGKYLRVGFFPDVKTTINLSGPEAYAAAYQDLLMFKEGSMNIHLIEADLRNFEISKTNISQSTEQEMASLWSFDDARAKAQFEEYKRNYFEGSLGEDDNLDFSQNIVVDKEYLLEKISSLARSSERGYIHYIVQLQGDKISYEAACNLFAKTPYDSVLFQKNIEDSEIAYYYNPGDGEIQEIDKYKIPSIISDRPKIKLTFIGHGKDEFNTDIFAGFDVDSLSTEIEAAIDLAKEDISPKSIEINLLGCNMFSYSINVEETYPGKLLLKVKDKISELMPSISQDSIIVSANQYEVRINSEGRRELLDHSGEWINKEESIIKDISSKEYISFNPKENKITVKSKNLPELSTLLQEIRNNSNSSDIELEEKVMLTECEINVISNIDTQIVEERIEEAKNLTSDSINYIKDEFKLIESISDALCDLKQQNELEDSHFISFEDISETDEGFSIRFINKETGESIFVETEKTIFSEYANHITEEISKIKGTIFDTVNGKLVKKVNLDTTHEVNTLNAAFFIQSLIEYNSSKESLSNLSVAMKVQVYAQLFSTGLNTITDAAKVVELVSTALDETIDLLPTLSEGLPIIATIIDGVSLGAAIKELSETSDPLLRQEIEAKIGIMAVNLTTATTAIITSSLGIASGFSILLVPLAGISAGIPSLVNNELVLRDKATKVVDYFKHVSLVETEGVFTLLDDKIMMPQDDLVISEIDFNNNSIVLGKCEIWRMEGGSGHTVTDDIDHFFSAPSITYREPHLSIYDVLEVQKEELDLSKDLMVLPNAPNRVFAWETGWTPGLRSLENDGTKLLDRIRDNYEGEFYWRYFAFIADALITTLKPRYEDTNIRINLDSNTRSFIVPIITTEYIREKLSYSFYGSGGTYALSLSQYNMGINIELSESDVWIIDVDNVVRDVTIESDKIKKGDLIEGILSTLSIEENKIILNSHEINFSGEVNGSNGFVSLTFSILEGINAIIEVDLLSKSYKLLISGELKILMLNSNHIQQKIDYIGFNSELQKNIPYRFVDSEGKENGFINGSTKEGLFVSELPDVVLISKVYMDDSKPSFGYYSNNLKDVKVITKDNVNILTGYYLKDDIKISLSLTLQDEKTIKLNSVHLDESGVAEILKFMNRKGNTNTSDSLMSFLESMNIKSIFVNFLQSNIKFILDANFIISGTTSIGQFEFICDENDNIQPYFIKFNTLETNYTLYVGNRQNMIVEPNYDLDDSGDISSTVINFSQKYLYGIDSCVNKVVISPNIYTDEINITPVYETNNTYPEVIVLDANYINEKINVNINDLSIRYVWSNDGNDFILMSTSEENKVSQVKIRFVNVFKDKTLANKLSFNFSDKQDVPVSEIILSFTPSYYEDGLIGYDLGLVSLYNEKFYINNFGMMVSGLIYINDSLYYFKPPVNNLITGFVTVGDDKYYFNPINGGAASIGETIIDDKNYYFNQSGVLQTGVFSTEDGFKYFAPANTLDENLEGEAIDFTGKLIIDENIYYFDDNYRGAVEWKELDGEMHYFSPETGKAFKGLNQIGDDKYYFNSDGVMQKGFVSINDNKHYFDDSGVMKVGYTEIDGKHFYFAENGEMQIGVFNTEDGFKYFAHHNEDLGNEEGEEISYSGILNFNNKIYYFDDSFTAVVGWKDLEDGSKYYFDEDTAEAYIGLSLINDGQYYFNDDGIMQVGFVTINDKVFYFSDSGIIESGVQNIDDNYFYIDDNGIVQIGVFDTSDGYKYFAPANTVNDNIYGQAVEYSGLVRVGEDVYYFGETYTIETGWIYDMENESDKYYFNPETKKACKGINLIDDIKYYFDEKGIMRTGLISFENNNYYFNENGEMQFGYINIEDKMFYFGEDGVMQIGVFNTPDGFKYFAHQNTLDENFEGESINYTGWLDLDEKRYYFTDEYIAATGSVIIDGEEYYFDPDTAQLVISE

SEQ ID NO: 115 - protein, 2366 aa, Clostridium difficile
MSLVNRKQLEKMANVRFRTQEDEYVAILDALEEYHNMSENTVVEKYLKLKDINSLTDIYIDTYKKSGRNKALKKFKEYLVTEVLELKNNNLTPVEKNLHFVWIGGQINDTAINYINQWKDVNSDYNVNVFYDSNAFLINTLKKTVVESAINDTLESFRENLNDPRFDYNKFFRKRMEIIYDKQKNFINYYKAQREENPELIIDDIVKTYLSNEYSKEIDELNTYIEESLNKITQNSGNDVRNFEEFKNGESFNLYEQELVERWNLAAASDILRISALKEIGGMYLDVDMLPGIQPDLFESIEKPSSVTVDFWEMTKLEAIMKYKEYIPEYTSEHFDMLDEEVQSSFESVLASKSDKSEIFSSLGDMEASPLEVKIAFNSKGIINQGLISVKDSYCSNLIVKQIENRYKILNNSLNPAISEDNDFNTTTNTFIDSIMAEANADNGRFMMELGKYLRVGFFPDVKTTINLSGPEAYAAAYQDLLMFKEGSMNIHLIEADLRNFEISKTNISQSTEQEMASLWSFDDARAKAQFEEYKRNYFEGSLGEDDNLDFSQNIVVDKEYLLEKISSLARSSERGYIHYIVQLQGDKISYEAACNLFAKTPYDSVLFQKNIEDSEIAYYYNPGDGEIQEIDKYKIPSIISDRPKIKLTFIGHGKDEFNTDIFAGFDVDSLSTEIEAAIDLAKEDISPKSIEINLLGCNMFSYSINVEETYPGKLLLKVKDKISELMPSISQDSIIVSANQYEVRINSEGRRELLDHSGEWINKEESIIKDISSKEYISFNPKENKITVKSKNLPELSTLLQEIRNNSNSSDIELEEKVMLTECEINVISNIDTQIVEERIEEAKNLTSDSINYIKDEFKLIESISDALCDLKQQNELEDSHFISFEDISETDEGFSIRFINKETGESIFVETEKTIFSEYANHITEEISKIKGTIFDTVNGKLVKKVNLDTTHEVNTLNAAFFIQSLIEYNSSKESLSNLSVAMKVQVYAQLFSTGLNTITDAAKVVELVSTALDETIDLLPTLSEGLPIIATIIDGVSLGAAIKELSETSDPLLRQEIEAKIGIMAVNLTTATTAIITSSLGIASGFSILLVPLAGISAGIPSLVNNELVLRDKATKVVDYFKHVSLVETEGVFTLLDDKIMMPQDDLVISEIDFNNNSIVLGKCEIWRMEGGSGHTVTDDIDHFFSAPSITYREPHLSIYDVLEVQKEELDLSKDLMVLPNAPNRVFAWETGWTPGLRSLENDGTKLLDRIRDNYEGEFYWRYFAFIADALITTLKPRYEDTNIRINLDSNTRSFIVPIITTEYIREKLSYSFYGSGGTYALSLSQYNMGINIELSESDVWIIDVDNVVRDVTIESDKIKKGDLIEGILSTLSIEENKIILNSHEINFSGEVNGSNGFVSLTFSILEGINAIIEVDLLSKSYKLLISGELKILMLNSNHIQQKIDYIGFNSELQKNIPYSFVDSEGKENGFINGSTKEGLFVSELPDVVLISKVYMDDSKPSFGYYSNNLKDVKVITKDNVNILTGYYLKDDIKISLSLTLQDEKTIKLNSVHLDESGVAEILKFMNRKGNTNTSDSLMSFLESMNIKSIFVNFLQSNIKFILDANFIISGTTSIGQFEFICDENDNIQPYFIKFNTLETNYTLYVGNRQNMIVEPNYDLDDSGDISSTVINFSQKYLYGIDSCVNKVVISPNIYTDEINITPVYETNNTYPEVIVLDANYINEKINVNINDLSIRYVWSNDGNDFILMSTSEENKVSQVKIRFVNVFKDKTLANKLSFNFSDKQDVPVSEIILSFTPSYYEDGLIGYDLGLVSLYNEKFYINNFGMMVSGLIYINDSLYYFKPPVNNLITGFVTVGDDKYYFNPINGGAASIGETIIDDKNYYFNQSGVLQTGVFSTEDGFKYFAPANTLDENLEGEAIDFTGKLIIDENIYYFDDNYRGAVEWKELDGEMHYFSPETGKAFKGLNQIGDDKYYFNSDGVMQKGFVSINDNKHYFDDSGVMKVGYTEIDGKHFYFAENGEMQIGVFNTEDGFKYFAHHNEDLGNEEGEEISYSGILNFNNKIYYFDDSFTAVVGWKDLEDGSKYYFDEDTAEAYIGLSLINDGQYYFNDDGIMQVGFVTINDKVFYFSDSGIIESGVQNIDDNYFYIDDNGIVQIGVFDTSDGYKYFAPANTVNDNIYGQAVEYSGLVRVGEDVYYFGETYTIETGWIYDMENESDKYYFNPETKKACKGINLIDDIKYYFDEKGIMRTGLISFENNNYYFNENGEMQFGYINIEDKMFYFGEDGVMQIGVFNTPDGFKYFAHQNTLDENFEGESINYTGWLDLDEKRYYFTDEYIAATGSVIIDGEEYYFDPDTAQLVISE

SEQ ID NO: 116 - protein, 2366 aa, Clostridium difficile
MSLVNRKQLEKMANVRFRTQEDEYVAILDALEEYHNMSENTVVEKYLKLKDINSLTDIYIDTYKKSGRNKALKKFKEYLVTEVLELKNNNLTPVEKNLHFVWIGGQINDTAINYINQWKDVNSDYNVNVFYDSNAFLINTLKKTIVESAINDTLESFRENLNNPRFDYNKFFRKRMEIIYDKQKNFINYYKAQREENPELIIDDIVKIYLSNEYSKEIDELNTYIEESLNKIKQNSGNDVRNFEEFKNGESFKLYEQELVERWNLAAASDILRISALKEIGGMYLDVDMLPGIQPDLFESIEKPSSVTVDFWEMTKLEAIMKYKEYIPGYTSEHFDMLDEEVQSSFESALASKSDKSEIFSSLGDMEASPLEVKIAFNSKGIINQGLISVKDSYCSNLIVKQIENRYKILNNSLNPAISEDNDFNTTTNTFIDSIMAEANADNGRFMMELGKYLRVGFFPDVKTTVNLSGPEAYAAAYQDLLMFKEGSMNIHLIEADLRNFEISKTNISQSTEQEMASLWTFDDARAKVQFEEYKRNYFEGSLGEDDNLDFSQNIVVDKEYLLEKISSLARSSERGYIHYIVQLQGDKISYEAACNLFAKTPYDSILFQKNIENSEVAYYYNPGDGEIQEIDKYRIPSIISDRPKIKLTFIGHGKDEFNTDIFAGLDVDSLSTEIETAIDLAKEDISSKSIEINLLGCNMFSYSINVEETYPGKLLLKVKDKISELMPSISQDSIIVSANQYEVRINNEGRRELLDHSGEWINKEESIIKDISSKEYISFNPKENKITVKSKNLPELSTLLQEIRNNSNLSDIELEEKVMLAECEINVISNIDTQIVEERIEEAKNLTSDSINYIKNEFKLIESISDSLYDLKQQNELDDSHFISFEDISKTEDGFSIRFINKETGESIFVETEKEIFSEYANHIEREISNIKDTIFDTVNGKLVKKVNLDAIHEVNTLNAAFFIQSLIGYSSSKESLSNLSVAMKVQVYAQLFSTGLNTITDAAKVVELVSTALDETIDLLPTLSEGLPVIATIIDGVSLGAAIKELSETSDPLLRQEIEAKIGIMAVNLTAATTAIITSSLGIASGFSILLVPLAGISAGIPSLVNNELVLRDKATKVVDYFKHISLVETEGAFTLLDDKIMIPQDDLVISEIDFNNNSIVLGKCEIWRMEGGSGHTVTNDIDHFFSSPTITYIKPHLSIYDVLEVQKEELDLSKDLMVLPNAPNRVFAWETGWTPGLRSLENEGTKLLDRIRDHYKGEFYWRYFAFIADALITTLKPRYEDTNIRINLDSNNRSFIVPIITTEHIREKLSYSFHGSGGTYALSLSQYNMGINIELSESDVWIIDVDNVVRDVTIDSDKIKKGDLIEGILSTLSIEDNKIILNHHEINFSGDVNGSNGFISLTFSILEGINAIIEVDLLSKSYKLLISGELKILMLNSNHIQQKIDYIGFNSELQKNIPYSFVDSEGKENGFINGSTKEGLFVSELPDVVLISKVYMDDSKPSFGYYSNNLKDVKVITKDNVNILTGYYLKDDIKISLSFTLQDEKTIKLNGVHLDESGVAEILKFMNKKGSTNTSDSLMSFLESVNIKSIFVNFLQSKINFILDANFIISGTTSIGQFEFICDENDNIQPYFIKFNTLETTYTLYVGNRQNMIVEPNYDLDDSGDISSTVINFSQKYLYGIDSCVNKVVISPNIYTDEINITPVYETNNNYPEVIVLDANYINEKINVNINDLSIRYVWSNDGNDFILMSTSEENKVSQVKIRFVNVFKDKTLANKLSFNFSDKQDVPVSEIISAFTPSYYEDGLIGYDLGLVSLYNEKFYINNFGMMVSGLIYINDSLYYFKPPVNNLITGFVTVGDDKYYFNPTNGGAASIGETIINDKNYYFNQSGILQTGVFSTEDGLKYFAPANTLDENLEGEAIDFTGKLIIDENIYYFEDNYRGAVEWKELDGEMYYFSPETGKAFKGLNQIGDDKYYFNSDGIMQKGFVSINDKKYYFDDSGVMKVGYIEIDGKYFYFAENGEMQIGVFNTSDGFKYFAHHNEDLGNEEGEAISYSGILNFNNKIYYFDYSFTAVVGWKDLEDGSKYYFDEDTAEAYVGLSLINDGQYYFNDDGIMQVGFVTINNKVFYFSDSGIIESGVQNIDDNYFYIDEKGIVQIGVFDTSDEYKYFAPANTVNDNIYGQAVDYSGLVRVGEDIYYFGETYTIETGWIYDMENESDKYYFNPETKKACKGINLIDDIKYYFDENGIMRTGLISFENNDYYFNENGEMQFGYINIEDKMFYFGEDGVMQIGVFNTQDGFKYFAHQNTLDENFEGESINYTGWLDLDEKRYYFTDEYIAATGSVIIDGEEYYFDPDTAQLVISE

SEQ ID NO: 117 - protein, 2366 aa, Clostridium difficile; identical to SEQ ID NO: 115

SEQ ID NO: 118 - protein, 2366 aa, Clostridium difficile; identical to SEQ ID NO: 116

SEQ ID NO: 119 - protein, 2366 aa, Clostridium difficile; identical to SEQ ID NO: 21

SEQ ID NO: 120 - protein, 2366 aa, Clostridium difficile
MSLVNRKQLEKMANVRFRTQEDEYVAILDALEEYHNMSENTVVEKYLKLKDINSLTDIYIDTYKKSGRNKALKKFKEYLVTEVLELKNNNLTPVEKNLHFVWIGGQINDTAINYINQWKDVNSDYNVNVFYDSNAFLINTLKKTVVESAINDTLESFRENLNDPRFDYNKFFRKRMEIIYDKQKNFINYYKAQREENPELIIDDIVKTYLSNEYSKEIDELNTYIEESLNKITQNSGNDVRNFEEFKNGESFNLYEQELVERWNLAAASDILRISALKEIGGMYLDVDMLPGIQPDLFESIEKPSSVTVDFWEMTKLEAIMKYKEYIPEYTSEHFDMLDEEVQSSFESVLASKSDKSEIFSSLGDMEASPLEVKIAFNSKGIINQGLISVKDSYCSNLIVKQIENRYKILNNSLNPAISEDNDFNTTTNTFIDSIMAEANADNGRFMMELGKYLRVGFFPDVKTTINLSGPEAYAAAYQDLLMFKEGSMNIHLIEADLRNFEIFKTNISQSTEQEMASLWSFDDARAKAQFEEYKRNYFEGSLGEDDNLDFSQNIVVDKEYLLEKISSLARSSERGYIHYIVQLQGDKISYEAACNLFAKTPYDSVLFQKNIEDSEIAYYYNPGDGEIQEIDKYKIPSIISDRPKIKLTFIGHGKDEFNTDIFAGFDVDSLSTEIEAAIDLAKEDISPKSIEINLLGCNMFSYSINVEETYPGKLLLKVKDKISELMPSISQDSIIVSANQYEVRINSEGRRELLDHSGEWINKEESIIKDISSKEYISFNPKENKITVKSKNLPELSTLLQEIRNNSNSSDIELEEKVMLTECEINVISNIDTQIVEERIEEAKNLTSDSINYIKDEFKLIESISDALCDLKQQNELEDSHFISFEDISETDEGFSIRFINKETGESIFVETEKTIFSEYANHITEEISKIKGTIFDTVNGKLVKKVNLDTTHEVNTLNAAFFIQSLIEYNSSKESLSNLSVAMKVQVYAQLFSTGLNTITDAAKVVELVSTALDETIDLLPTLSEGLPIIATIIDGVSLGAAIKELSETSDPLLRQEIEAKIGIMAVNLTTATTAIITSSLGIASGFSILLVPLAGISAGIPSLVNNELVLRDKATKVVDYFKHVSLVETEGVFTLLDDKIMMPQDDLVISEIDFNNNSIVLGKCEIWRMEGGSGHTVTDDIDHFFSAPSITYREPHLSIYDVLEVQKEELDLSKDLMVLPNAPNRVFAWETGWTPGLRSLENDGTKLLDRIRDNYEGEFYWRYFAFIADALITTLKPRYEDTNIRINLDSNTRSFIVPIITTEYIREKLSYSFYGSGGTYALSLSQYNMGINIELSESDVWIIDVDNVVRDVTIESDKIKKGDLIEGILSTLSIEENKIILNSHEINFSGEVNGSNGFVSLTFSILEGINAIIEVDLLSKSYKLLISGELKILMLNSNHIQQKIDYIGFNSELQKNIPYSFVDSEGKENGFINGSTKEGLFVSELPDVVLISKVYMDDSKPSFGYYSNNLKDVKVITKDNVNILTDYYLKDDIKISLSLTLQDEKTIKLNSVHLDESGVAEILKFMNRKGNTNTSDSLMSFLESMNIKSIFVNFLQSNIKFILDANFIISGTTSIGQFEFICDENDNIQPYFIKFNTLETNYTLYVGNRQNMIVEPNYDLDDSGDISSTVINFSQKYLYGIDSCVNKVVISPNIYTDEINITPVYETNNTYPEVIVLDANYINEKINVNINDLSIRYVWSNDGNDFILMSTSEENKVSQVKIRFVNVFKDKTLANKLSFNFSDKQDVPVSEIILSFTPSYYEDGLIGYDLGLVSLYNEKFYINNFGMMVSGLIYINDSLYYFKPPVNNLITGFVTVGDDKYYFNPINGGAASIGETIIDDKNYYFNQSGVLQTGVFSTEDGFKYFAPANTLDENLEGEAIDFTGKLIIDENIYYFDDNYRGAVEWKELDGEMHYFSPETGKAFKGLNQIGDYKYYFNSDGVMQKGFVSINDNKHYFDDSGVMKVGYTEIDGKHFYFAENGEMQIGVFNTEDGFKYFAHHNEDLGNEEGEEISYSGILNFNNKIYYFDDSFTAVVGWKDLEDGSKYYFDEDTAEAYIGLSLINDGQYYFNDDGIMQVGFVTINDKVFYFSDSGIIESGVQNIDDNYFYIDDNGIVQIGVFDTSDGYKYFAPANTVNDNIYGQAVEYSGLVRVGEDVYYFGETYTIETGWIYDMENESDKYYFNPETKKACKGINLIDDIKYYFDEKGIMRTGLISFENNNYYFNENGEMQFGYINIEDKMFYFGEDGVMQIGVFNTPDGFKYFAHQNTLDENFEGESINYTGWLDLDEKRYYFTDEYIAATGSVIIDGEEYYFDPDTAQLVISE

SEQ ID NO: 121 - protein, 2367 aa, Clostridium difficile
MSLVNRKQLEKMANVRFRVQEDEYVAILDALEEYHNMSENTVVEKYLKLKDINSLTDTYIDTYKKSGRNKALKKFKEYLVIEILELKNSNLTPVEKNLHFIWIGGQINDTAINYINQWKDVNSDYNVNVFYDSNAFLINTLKKTIIESASNDTLESFRENLNDPEFNHTAFFRKRMQIIYDKQQNFINYYKAQKEENPDLIIDDIVKTYLSNEYSKDIDELNAYIEESLNKVTENSGNDVRNFEEFKTGEVFNLYEQELVERWNLAGASDILRVAILKNIGGVYLDVDMLPGIHPDLFKDINKPDSVKTAVDWEEMQLEAIMKHKEYIPEYTSKHFDTLDEEVQSSFESVLASKSDKSEIFLPLGDIEVSPLEVKIAFAKGSIINQALISAKDSYCSDLLIKQIQNRYKILNDTLGPIISQGNDFNTTMNNFGESLGAIANEENISFIAKIGSYLRVGFYPEANTTITLSGPTIYAGAYKDLLTFKEMSIDTSILSSELRNFEFPKVNISQATEQEKNSLWQFNEERAKIQFEEYKKNYFEGALGEDDNLDFSQNTVTDKEYLLEKISSSTKSSERGYVHYIVQLQGDKISYEAACNLFAKNPYDSILFQKNIEDSEVAYYYNPTDSEIQEIDKYRIPDRISDRPKIKLTFIGHGKAEFNTDIFAGLDVDSLSSEIETAIGLAKEDISPKSIEINLLGCNMFSYSVNVEETYPGKLLLRVKDKVSELMPSMSQDSIIVSANQYEVRINSEGRRELLDHSGEWINKEESIIKDISSKEYISFNPKENKIIVKSKNLPELSTLLQEIRNNSNSSDIELEEKVMLAECEINVISNIETQVVEERIEEAKSLTSDSINYIKNEFKLIESISDALCDLKQQNELEDSHFISFEDISETDEGFSIRFINKETGESIFVETEKTIFSEYANHITEEISKIKGTIFDTVNGKLVKKVNLDTTHEVNTLNAAFFIQSLIEYNSSKESLSNLSVAMKVQVYAQLFSTGLNTITDAAKVVELVSTALDETIDLLPTLSEGLPIIATIIDGVSLGAAIKELSETSDPLLRQEIEAKIGIMAVNLTTATTAIITSSLGIASGFSILLVPLAGISAGIPSLVNNELVLRDKATKVVDYFKHVSLVETEGVFTLLDDKVMMPQDDLVISEIDFNNNSIVLGKCEIWRMEGGSGHTVTDDIDHFFSAPSITYREPHLSIYDVLEVQKEELDLSKDLMVLPNAPNRVFAWETGWTPGLRSLENDGTKLLDRIRDNYEGEFYWRYFAFIADALITTLKPRYEDTNIRINLDSNTRSFIVPIITTEYIREKLSYSFYGSGGTYALSLSQYNMGINIELSESDVWIIDVDNVVRDVTIESDKIKKGDLIEGILSTLSIEENKIILNSHEINFSGEVNGSNGFVSLTFSILEGINAIIEVDLLSKSYKLLISGELKILMLNSNHIQQKIDYIGFNSELQKNIPYSFVDSEGKENGFINGSTKEGLFVSELPDVVLISKVYMDDSKPSFGYYSNNLKDVKVITKDNVNILTGYYLKDDIKISLSLTLQDEKTIKLNSVHLDESGVAEILKFMNRKGSTNTSDSLMSFLESMNIKSIFVNFLQSNIKFILDANFIISGTTSIGQFEFICDENNNIQPYFIKFNTLETNYTLYVGNRQNMIVEPNYDLDDSGDISSTVINFSQKYLYGIDSCVNKVVISPNIYTDEINITPVYETNNTYPEVIVLDANYINEKINVNINDLSIRYVWSNDGNDFILMSTSEENKVSQVKIRFVNVFKDKTLANKLSFNFSDKQDVPVSEIILSFTPSYYEDGLIGYDLGLVSLYNEKFYINNFGMMVSGLIYINDSLYYFKPPVNNLITGFVTVGDDKYYFNPINGGAASIGETIIDDKNYYFNQSGVLQTGVFSTEDGFKYFAPANTLDENLEGEAIDFTGKLIIDENIYYFEDNYRGAVEWKELDGEMHYFSPETGKAFKGLNQIGDDKYYFNSDGVMQKGFVSINDNKHYFDDSGVMKVGYTEIDGKHFYFAENGEMQIGVFNTEDGFKYFAHHNEDLGNEEGEEISYSGILNFNNKIYYFDDSFTAVVGWKDLEDGSKYYFDEDTAEAYIGLSLINDGQYYFNDDGIMQVGFVTINDKVFYFSDSGIIESGVQNIDDNYFYIDDNGIVQIGVFDTSDGYKYFAPANTVNDNIYGQAVEYSGLVRVGEDVYYFGETYTIETGWIYDMENESDKYYFDPETKKACKGINLIDDIKYYFDEKGIMRTGLISFENNNYYFNENGEMQFGYINIEDKMFYFGEDGVMQIGVFNTPDGFKYFAHQNTLDENFEGESINYTGWLDLDEKRYYFTDEYIAATGSVIIDGEEYYFDPDTAQLVISE

SEQ ID NO: 122 - protein, 2366 aa, Clostridium difficile; identical to SEQ ID NO: 111

SEQ ID NO: 123 - protein, 2366 aa, Clostridium difficile; identical to SEQ ID NO: 116

SEQ ID NO: 124 - protein, 2366 aa, Clostridium difficile; identical to SEQ ID NO: 115

SEQ ID NO: 125 - protein, 2366 aa, Clostridium difficile; identical to SEQ ID NO: 116

SEQ ID NO: 126 - protein, 2367 aa, Clostridium difficile
MSLVNRKQLEKMANVRFRVQEDEYVAILDALEEYHNMSENTVVEKYLKLKDINSLTDTYIDTYKKSGRNKALKKFKEYLVTEILELKNSNLTPVEKNLHFIWIGGQINDTAINYINQWKDVNSDYNVNVFYDSNAFLINTLKKTIIESASNDTLESFRENLNDPEFNHTAFFRKRMQIIYDKQQNFINYYKAQKEENPDLIIDDIVKTYLSNEYSKDIDELNAYIEESLNKVTENSGNDVRNFEEFKTGEVFNLYEQELVERWNLAGASDILRVAILKNIGGVYLDVDMLPGIHPDLFKDINKPDSVKTAVDWEEMQLEAIMKYKEYIPEYTSKHFDTLDEEVQSSFESVLASKSDKSEIFLPLGDIEVSPLEVKIAFAKGSIINQALISAKDSYCSDLLIKQIQNRYKILNDTLGPIISQGNDFNTTMNNFGESLGAIANEENISFIAKIGSYLRVGFYPEANTTITLSGPTIYAGAYKDLLTFKEMSIDTSILSSELRNFEFPKVNISQATEQEKNSLWQFNEERAKIQFEEYKKNYFEGALGEDDNLDFSQNTVIDKEYLLEKISSSTKSSERGYVHYIVQLQGDKISYEAACNLFAKNPYDSILFQKNIEDSEVAYYYNPTDSEIQEIDKYRIPDRISDRPKIKLTLIGHGKAEFNTDIFAGLDVDSLSSEIETIIDLAKADISPKSIEINLLGCNMFSYSVNVEETYPGKLLLRVKDKVSELMPSISQDSIIVSANQYEVRINSEGRRELLDHSGEWINKEESIIKDISSKEYISFNPKENKIIVKSKNLPELSTLLQEIRNNSNSSDIELEEKVMLAECEINVISNIETQVVEERIEEAKSLTSDSINYIKNEFKLIESISDALYDLKQQNELEESHFISFEDISETDEGFSIRFIDKETGESIFVETEKAIFSEYANHITEEISKIKGTIFDTVNGKLVKKVNLDATHEVNTLNAAFFIQSLIEYNSSKESLSNLSVAMKVQVYAQLFSTGLNTITDAAKVVELVSTALDETIDLLPTLSEGLPVIATIIDGVSLGAAIKELSETSDPLLRQEIEAKIGIMAVNLTAATTAIITSSLGIASGFSILLVPLAGISAGIPSLVNNELILRDKATKVVDYFSHISLAESEGAFTSLDDKIMMPQDDLVISEIDFNNNSITLGKCEIWRMEGGSGHTVTDDIDHFFSSPSITYREPHLSIYDVLEVKKEELDLSKDLMVLPNAPNRVFGWETGWTPGLRGLENDGTKLLDRIRDQYEGQFYWRFFAFIADALITTLKPRYEDTNVRISLDSNTRSFIVPVITTEYIREKLSYSFYGSGGTYALSLSQYNMNINIELNENDTWVIDVDNVVRSVTIESDKIKKGDLIENILSKLSIEDNKIILDNHEINFSGTLNGGNGFVSLTFSILEGINAVIEVDLLSKSYKVLISGELKTLMANSNSVQQKIDYIGLNSELQKNIPYSFMDDKGKENGFINCSTKEGLFVSELSDVVLIIKVYMDNSKPPFGYYSNDLKDVKAITKDDVIILTGYYLKDDIKISLSFTIQDKNTIKLNGVYLDENGVAEILKFMNKKGSTNTSDSLMSFLESMNIKSIFIKSLKSNAKLILDTNFIISGTTSIGQFEFICDKDNNIQPYFIKFNTLETKYTLYVGNRQNMIVEPNYDLDDSGDISSTVINFSQKYLYGIDSCVNKVIISPNIYTDEINITPIYEANNTYPEVIVLDTNYISEKINININDLSIRYVWSNDGSDFILMSTDEENKVSQVKIRFTNVFKGNTISDKISFNFSDKQDVSINKIISTFTPSYYVEGLLNYHLGLISLYNEKFYINNFGMMVSGLVYINDSLYYFKPPIKNLITGFTTIGDDKYYFNPDNGGAASVGETIIDGKNYYFSPNGVLQTGVFSTEDGFKYFAPADTLDENLEGEAIDFTGKLIIDENVYYFGDNYRAAIEWQTLDDEVYYFSTDTGRAFKGLNQIGDDKFYFNSDGIMQKGFVNINDKTFYFDDSGVMKSGYTEIDGKHFYFAENGEMQIGVFNTADGFKYFAHHDEDLGNEEGEALSYSGILNFNNKIYYFDDSFTAVVGWKDSEDGSKYYFDEDTAEAYIGISTINDGKYYFNDSGIMQIGFVTINNEVFYFSDSGIVESGMQNIDDNYFYIDENGLVQIGVFDTSDGYKYFAPANTVNDNIYGQAVEYSGLVRVGEDVYYFGETYTIETGWIYDMENESDKYYFDPETKKAYKGINVIDDIKYYFDENGIMRTGLITFEDNHYYFNEDGIMQYGYINIEDKMFYFNEDGVMQIGVFNTADGFKYFAHQNTLDENFEGESINYTGWLDLDEKRYYFTDEYIAAIGSVIIDGEEYYFDPDTAELVISE

SEQ ID NO: 127 - protein, 2367 aa, Clostridium difficile; identical to SEQ ID NO: 126

SEQ ID NO: 128 - protein, 2367 aa, Clostridium difficile
MSLVNRKQLEKMANVRFRVQEDEYVAILDALEEYHNMSENTVVEKYLKLKDINSLTDTYIDTYKKSGRNKALKKFKEYLVTEILELKNSNLTPVEKNLHFIWIGGQINDTAINYINQWKDVNSDYNVNVFYDSNAFLINTLKKTIIESASNDTLESFRENLNDPEFNHTAFFRKRMQIIYDKQQNFINYYKAQKEENPDLIIDDIVKTYLSNEYSKDIDELNAYIEESLNKVTENSGNDVRNFEEFKTGEVFNLYEQELVERWNLAGASDILRVAILKNIGGVYLDVDMLPGIHPDLFKDINKPDSVKTAVDWEEMQLEAIMKYKEYIPEYTSKHFDTLDEEVQSSFESVLASKSDKSEIFLPLGDIEVSPLEVKIAFAKGSIINQALISAKDSYCSDLLIKQIQNRYKILNDTLGPIISQGNDFNTTMNNFGESLGAIANEENISFIAKIGSYLRVGFYPEANTTITLSGPTIYAGAYKDLLTFKEMSIDTSILSSELRNFEFPKVNISQATEQEKNSLWQFNEERAKIQFEEYKKNYFEGALGEDDNLDFSQNTVIDKEYLLEKISSSTKSSERGYVHYIVQLQGDKISYEAACNLFAKNPYDSILFQKNIEDSEVAYYYNPTDSEIQEIDKYRIPDRISDRPKIKLTLIGHGKAEFNTDIFAGLDVDSLSSEIETIIDLAKADISPKSIEINLLGCNMFSYSVNVEETYPGKLLLRVKDKVSELMPSISQDSIIVSANQYEVRINSEGRRELLDHSGEWINKEESIIKDISSKEYISFNPKENKIIVKSKNLPELSTLLQEIRNNSNSSDIELEEKVMLAECEINVISNIETQVVEERIEEAKSLTSDSINYIKNEFKLIESISDALYDLKQQNELEESHFISFEDISETDEGFSIRFIDKETGESIFVETEKAIFSEYANHITEEISKIKGTIFDTVNGKLVKKVNLDATHEVNTLNAAFFIQSLIEYNSSKESLSNLSVAMKVQVYAQLFSTGLNTITDAAKVVELVSTALDETIDLLPTLSEGLPVIATIIDGVSLGAAIKELSETSDPLLRQEIEAKIGIMAVNLTAATTAIITSSLGIASGFSILLVPLAGISAGIPSLVNNELILRDKATKVVDYFSHISLAESEGAFTSLDDKIMMPQDDLVISEIDFNNNSITLGKCEIWRMEGGSGHTVTDDIDHFFSSPSITYREPHLSIYDVLEVKKEELDLSKDLMVLPNAPNRVFGWETGWTPGLRGLENDGTKLLDRIRDQYEGQFYWRFFAFIADALITTLKPRYEDTNVRISLDSNTRSFIVPVITTEYIREKLSYSFYGSGGTYALSLSQYNMNINIELNENDTWVIDVDNVVRSVTIESDKIKKGDLIENILSKLSIEDNKIILDNHEINFSGTLNGGNGFVSLTFSILEGINAVIEVDLLSKSYKVLISGELKTLMANSNSVQQKIDYIGLNSELQKNIPYSFMDDKGKENGFINCSTKDGLFVSELSDVVLIIKVYMDNSKPPFGYYSNDLKDVKAITKDDVIILTGYYLKDDIKISLSFTIQDKNTIKLNGVYLDENGVAEILKFMNKKGSTNTSDSLMSFLESMNIKSIFIKSLKSNAKLILDTNFIISGTTSIGQFEFICDKDNNIQPYFIKFNTLETKYTLYVGNRQNMIVEPNYDLDDSGDISSTVINFSQKYLYGIDSCVNKVIISPNIYTDEINITPIYEANNTYPEVIVLDTNYISEKINININDLSIRYVWSNDGSDFILMSTDEENKVSQVKIRFTNVFKGNTISDKISFNFSDKQDVSINKIISTFTPSYYVEGLLNYHLGLISLYNEKFYINNFGMMVSGLVYINDSLYYFKPPIKNLITGFTTIGDDKYYFNPDNGGAASVGETIIDGKNYYFSPNGVLQTGVFSTEDGFKYFAPADTLDENLEGEAIDFTGKLIIDENVYYFGDNYRAAIEWQTLDDEVYYFSTDTGRAFKGLNQIGDDKFYFNSDGIMQKGFVNINDKTFYFDDSGVMKSGYTEIDGKHFYFAENGEMQIGVFNTADGFKYFAHHDEDLGNEEGEALSYSGILNFNNKIYYFDDSFTAVVGWKDSEDGSKYYFDEDTAEAYIGISTINDGKYYFNDSGIMQIGFVTINNEVFYFSDSGIVESGMQNIDDNYFYIDENGLVQIGVFDTSDGYKYFAPANTVNDNIYGQAVEYSGLVRVGEDVYYFGETYTIETGWIYDMENESDKYYFDPETKKAYKGINVIDDIKYYFDENGIMRTGLITFEDNHYYFNEDGIMQYGYINIEDKMFYFNEDGVMQIGVFNTADGFKYFAHQNTLDENFEGESINYTGWLDLDEKRYYFTDEYIAAIGSVIIDGEEYYFDPDTAELVISE

SEQ ID NO: 129 - protein, 2366 aa, Clostridium difficile; identical to SEQ ID NO: 111

SEQ ID NO: 130 - protein, 2366 aa, Clostridium difficile; identical to SEQ ID NO: 115

SEQ ID NO: 131 - protein, 2366 aa, Clostridium difficile
MSLVNRKQLEKMANVRFRTQEDEYVAILDALEEYHNMSENTVVEKYLKLKDINSLTDIYIDTYKKSGRNKALKKFKEYLVTEVLELKNNNLTPVEKNLHFVWIGGQINDTAINYINQWKDVNSDYNVNVFYDSNAFLINTLKKTVVESAINDTLESFRENLNDPRFDYNKFFRKRMEIIYDKQKNFINYYKAQREENPELIIDDIVKTYLSNEYSKEIDELNTYIEESLNKITQNSGNDVRNFEEFKNGESFNLYEQELVERWNLAAASDILRISALKEIGGMYLDVDMLPGIQPDLFESIEKPSSVTVDFWEMTKLEAIMKYKEYIPEYTSEHFDMLDEEVQSSFESVLASKSDKSEIFSSLGDMEASPLEVKIAFNSKGIINQGLISVKDSYCSNLIVKQIENRYKILNNSLNPAISEDNDFNTTTNTFIDSIMAEANADNGRFMMELGKYLRVGFFPDVKTTINLSGPEAYAAAYQDLLMFKEGSMNIHLIEADLRNFEISKTNISQSTEQEMASLWSFDDARAKAQFEEYKRNYFEGSLGEDDNLDFSQNIVVDKEYLLEKISSLARSSERGYIHYIVQLQGDKISYEAACNLFAKTPYDSVLFQKNIEDSEIAYYYNPGDGEIQEIDKYKIPSIISDRPKIKLTFIGHGKDEFNTDIFAGFDVDSLSTEIEAAIDLAKEDISPKSIEINLLGCNMFSYSINVEETYPGKLLLKVKDKISELMPSISQDSIIVSANQYEVRINSEGRRELLDHSGEWINKEESIIKDISSKEYISFNPKENKITVKSKNLPELSTLLQEIRNNSNSSDIELEEKVMLTECEINVISNIDTQIVEERIEEAKNLTSDSINYIKDEFKLIESISDALCDLKQQNELEDSHFISFEDISETDEGFSIRFINKETGESIFVETEKTIFSEYANHITEEISKIKGTIFDTVNGKLVKKVNLDTTHEVNTLNAAFFIQSLIEYNSSKESLSNLSVAMKVQVYAQLFSTGLNTITDAAKVVELVSTALDETIDLLPTLSEGLPIIATIIDGVSLGAAIKELSETSDPLLRQEIEAKIGIMAVNLTTATTAIITSSLGIASGFSILLVPLAGISAGIPSLVNNELVLRDKATKVVDYFKHVSLVETEGVFTLLDDKIMMPQDDLVISEIDFNNNSIVLGKCEIWRMEGGSGHTVTDDIDHFFSAPSITYREPHLSIYDVLEVQKEELDLSKDLMVLPNAPNRVFAWETGWTPGLRSLENDGTKLLDRIRDNYEGEFYWRYFAFIADALITTLKPRYEDTNIRINLDSNTRSFIVPIITTEYIREKLSYSFYGSGGTYALSLSQYNMGINIELSESDVWIIDVDNVVRDVTIESDKIKKGDLIEGILSTLSIEENKIILNSHEINFSGEVNGSNGFVSLTFSILEGINAIIEVDLLSKSYKLLISGELKILMLNSNHIQQKIDYIGFNSELQKNIPYSFVDSEGKENGFINGSTKEGLFVSELPDVVLISKVYMDDSKPSFGYYSNNLKDVKVITKDNVNILTGYYLKDDIKISLSLTLQDEKTIKLNSVHLDESGVAEILKFMNRKGNTNTSDSLMSFLESMNIKSIFVNFLQSNIKFILDANFIISGTTSIGQFEFICDENDNIQPYFIKFNTLETNYTLYVGNRQNMIVEPNYDLDDSGDISSTVINFSQKYLYGIDSCVNKVVISPNIYTDEINITPVYETNNTYPEVIVLDANYINEKINVNINDLSIRYVWSNDGNDFILMSTSEENKVSQVKIRFVNVFKDKTLANKLSFNFSDKQDVPVSEIILSFTPSYYEDGLIGYDLGLVSLYNEKFYINNFGMMLSGLIYINDSLYYFKPPVNNLITGFVTVGDDKYYFNPINGGAASIGETIIDDKNYYFNQSGVLQTGVFSTEDGFKYFAPANTLDENLEGEAIDFTGKLIIDENIYYFDDNYRGAVEWKELDGEMHYFSPETGKAFKGLNQIGDDKYYFNSDGVMQKGFVSINDNKHYFDDSGVMKVGYTEIDGKHFYFAENGEMQIGVFNTEDGFKYFAHHNEDLGNEEGEEISYSGILNFNNKIYYFDDSFTAVVGWKDLEDGSKYYFDEDTAEAYIGLSLINDGQYYFNDDGIMQVGFVTINDKVFYFSDSGIIESGVQNIDDNYFYIDDNGIVQIGVFDTSDGYKYFAPANTVNDNIYGQAVEYSGLVRVGEDVYYFGETYTIETGWIYDMENESDKYYFNPETKKACKGINLIDDIKYYFDEKGIMRTGLISFENNNYYFNENGEMQFGYINIEDKMFYFGEDGVMQIGVFNTPDGFKYFAHQNTLDENFEGESINYTGWLDLDEKRYYFTDEYIAATGSVIIDGEEYYFDPDTAQLVISE

SEQ ID NO: 132 - protein, 2366 aa, Clostridium difficile; identical to SEQ ID NO: 111

SEQ ID NO: 133 - protein, 2366 aa, Clostridium difficile; identical to SEQ ID NO: 21

SEQ ID NO: 134 - protein, 2710 aa, Clostridium difficile; identical to SEQ ID NO: 88

SEQ ID NO: 135 - protein, 2710 aa, Clostridium difficile
MSLISKEELIKLAYSIRPRENEYKTILTNLDEYNKLTTNNNENKYLQLKKLNESIDVFMNKYKTSSRNRALSNLKKDILKEVILIKNSNTSPVEKNLHFVWIGGEVSDIALEYIKQWADINAEYNIKLWYDSEAFLVNTLKKAIVESSTTEALQLLEEEIQNPQFDNMKFYKKRMEFIYDRQKRFINYYKSQINKPTVPTIDDIIKSHLVSEYNRDETVLESYRTNSLRKINSNHGIDIRANSLFTEQELLNIYSQELLNRGNLAAASDIVRLLALKNFGGVYLDVDMLPGIHSDLFKTISRPSSIGLDRWEMIKLEAIMKYKKYINNYTSENFDKLDQQLKDNFKLIIESKSEKSEIFSKLENLNVSDLEIKIAFALGSVINQALISKQGSYLTNLVIEQVKNRYQFLNQHLNPAIESDNNFTDTTKIFHDSLFNSATAENSMFLTKIAPYLQVGFMPEARSTISLSGPGAYASAYYDFINLQENTIEKTLKASDLIEFKFPENNLSQLTEQEINSLWSFDQASAKYQFEKYVRDYTGGSLSEDNGVDFNKNTALDKNYLLNNKIPSNNVEEAGSKNYVHYIIQLQGDDISYEATCNLFSKNPKNSIIIQRNMNESAKSYFLSDDGESILELNKYRIPERLKNKEKVKVTFIGHGKDEFNTSEFARLSVDSLSNEISSFLDTIKLDISPKNVEVNLLGCNMFSYDFNVEETYPGKLLLSIMDKITSTLPDVNKNSITIGANQYEVRINSEGRKELLAHSGKWINKEEAIMSDLSSKEYIFFDSIDNKLKAKSKNIPGLASISEDIKTLLLDASVSPDTKFILNNLKLNIESSIGDYIYYEKLEPVKNIIHNSIDDLIDEFNLLENVSDELYELKKLNNLDEKYLISFEDISKNNSTYSVRFINKSNGESVYVETEKEIFSKYSEHITKEISTIKNSIITDVNGNLLDNIQLDHTSQVNTLNAAFFIQSLIDYSSNKDVLNDLSTSVKVQLYAQLFSTGLNTIYDSIQLVNLISNAVNDTINVLPTITEGIPIVSTILDGINLGAAIKELLDEHDPLLKKELEAKVGVLAINMSLSIAATVASIVGIGAEVTIFLLPIAGISAGIPSLVNNELILHDKATSVVNYFNHLSESKKYGPLKTEDDKILVPIDDLVISEIDFNNNSIKLGTCNILAMEGGSGHTVTGNIDHFFSSPSISSHIPSLSIYSAIGIETENLDFSKKIMMLPNAPSRVFWWETGAVPGLRSLENDGTRLLDSIRDLYPGKFYWRFYAFFDYAITTLKPVYEDTNIKIKLDKDTRNFIMPTITTNEIRNKLSYSFDGAGGTYSLLLSSYPISTNINLSKDDLWIFNIDNEVREISIENGTIKKGKLIKDVLSKIDINKNKLIIGNQTIDFSGDIDNKDRYIFLTCELDDKISLIIEINLVAKSYSLLLSGDKNYLISNLSNTIEKINTLGLDSKNIAYNYTDESNNKYFGAISKTSQKSIIHYKKDSKNILEFYNDSTLEFNSKDFIAEDINVFMKDDINTITGKYYVDNNTDKSIDFSISLVSKNQVKVNGLYLNESVYSSYLDFVKNSDGHHNTSNFMNLFLDNISFWKLFGFENINFVIDKYFTLVGKTNLGYVEFICDNNKNIDIYFGEWKTSSSKSTIFSGNGRNVVVEPIYNPDTGEDISTSLDFSYEPLYGIDRYINKVLIAPDLYTSLININTNYYSNEYYPEIIVLNPNTFHKKVNINLDSSSFEYKWSTEGSDFILVRYLEESNKKILQKIRIKGILSNTQSFNKMSIDFKDIKKLSLGYIMSNFKSFNSENELDRDHLGFKIIDNKTYYYDEDSKLVKGLININNSLFYFDPIEFNLVTGWQTINGKKYYFDINTGAALTSYKIINGKHFYFNNDGVMQLGVFKGPDGFEYFAPANTQNNNIEGQAIVYQSKFLTLNGKKYYFDNNSKAVTGWRIINNEKYYFNPNNAIAAVGLQVIDNNKYYFNPDTAIISKGWQTVNGSRYYFDTDTAIAFNGYKTIDGKHFYFDSDCVVKIGVFSTSNGFEYFAPANTYNNNIEGQAIVYQSKFLTLNGKKYYFDNNSKAVTGWQTIDSKKYYFNTNTAEAATGWQTIDGKKYYFNTNTAEAATGWQTIDGKKYYFNTNTAIASTGYTIINGKHFYFNTDGIMQIGVFKGPNGFEYFAPANTDANNIEGQAILYQNEFLTLNGKKYYFGSDSKAVTGWRIINNKKYYFNPNNAIAAIHLCTINNDKYYFSYDGILQNGYITIERNNFYFDANNESKMVTGVFKGPNGFEYFAPANTHNNNIEGQAIVYQNKFLTLNGKKYYFDNDSKAVTGWQTIDGKKYYFNLNTAEAATGWQTIDGKKYYFNLNTAEAATGWQTIDGKKYYFNTNTFIASTGYTSINGKHFYFNTDGIMQIGVFKGPNGFEYFAPANTDANNIEGQAILYQNKFLTLNGKKYYFGSDSKAVTGLRTIDGKKYYFNTNTAVAVTGWQTINGKKYYFNTNTSIASTGYTIISGKHFYFNTDGIMQIGVFKGPDGFEYFAPANTDANNIEGQAIRYQNRFLYLHDNIYYFGNNSKAATGWVTIDGNRYYFEPNTAMGANGYKTIDNKNFYFRNGLPQIGVFKGSNGFEYFAPANTDANNIEGQAIRYQNRFLHLLGKIYYFGNNSKAVTGWQTINGKVYYFMPDTAMAAAGGLFEIDGVIYFFGVDGVKAPGIYG

SEQ ID NO: 136 - protein, 2710 aa, Clostridium difficile
MSLISKEELIKLAYSIRPRENEYKTILTNLDEYNKLTTNNNENKYLQLKKLNESIDVFMNKYKTSSRNRALSNLKKDILKEVILIKNSNTSPVEKNLHFVWIGGEVSDIALEYIKQWADINAEYNIKLWYDSEAFLVNTLKKAIVESSTTEALQLLEEEIQNPQFDNMKFYKKRMEFIYDRQKRFINYYKSQINKPTVPTIDDIIKSHLVSEYNRDETVLESYRTNSLRKINSNHGIDIRANSLFTEQELLNIYSQELLNRGNLAAASDIVRLLALKNFGGVYLDVDMLPGIHSDLFKTISRPSSIGLDRWEMIKLEAIMKYKKYINNYTSENFDKLDQQLKDNFKLIIESKSEKSEIFSKLENLNVSDLEIKIAFALGSVINQALISKQGSYLTNLVIEQVKNRYQFLNQHLNPAIESDNNFTDTTKIFHDSLFNSATAENSMFLTKIAPYLQVGFMPEARSTISLSGPGAYASAYYDFINLQENTIEKTLKASDLIEFKFPENNLSQLTEQEINSLWSFDQASAKYQFEKYVRDYTGGSLSEDNGVDFNKNTALDKNYLLNNKIPSNNVEEAGSKNYVHYIIQLQGDDISYEATCNLFSKNPKNSIIIQRNMNESAKSYFLSDDGESILELNKYRIPERLKNKEKVKVTFIGHGKDEFNTSEFARLSVDSLSNEISSFLDTIKLDISPKNVEVNLLGCNMFSYDFNVEETYPGKLLLSIMDKITSTLPDVNKNSITIGANQYEVRINSEGRKELLAHSGKWINKEEAIMSDLSSKEYIFFDSIDNKLKAKSKNIPGLASISEDIKTLLLDASVSPDTKFILNNLKLNIESSIGDYIYYEKLEPVKNIIHNSIDDLIDEFNLLENVSDELYELKKLNNLDEKYLISFEDISKNNSTYSVRFINKSNGESVYVETEKEIFSKYSEHITKEISTIKNSIITDVNGNLLDNIQLDHTSQVNTLNAAFFIQSLIDYSSNKDVLNDLSTSVKVQLYAQLFSTGLNTIYDSIQLVNLISNAVNDTINVLPTITEGIPIVSTILDGINLGAAIKELLDEHDPLLKKELEAKVGVLAINMSLSIAATVASIVGIGAEVTIFLLPIAGISAGIPSLVNNELILHDKATSVVNYFNHLSESKKYGPLKTEDDKILVPIDDLVISEIDFNNNSIKLGTCNILAMEGGSGHTVTGNIDHFFSSPSISSHIPSLSIYSAIGIETENLDFSKKIMMLPNAPSRVFWWETGAVPGLRSLENDGTRLLDSIRDLYPGKFYWRFYAFFDYAITTLKPVYEDTNIKIKLDKDTRNFIMPTITTNEIRNKLSYSFDGAGGTYSLLLSSYPISTNINLSKDDLWIFNIDNEVREISIENGTIKKGKLIKDVLSKIDINKNKLIIGNQTIDFSGDIDNKDRYIFLTCELDDKISLIIEINLVAKSYSLLLSGNKNYLISNLSNTIEKINTLGLDSKNIAYNYTDESNNKYFGAISKTSQKSIIHYKKDSKNILEFYNDSTLEFNSKDFIAEDINVFMKDDINTITGKYYVDNNTDKGIDFSISLVSKNQVKVNGLYLNESVYSSYLDFVKNSDGHHNTSNFMNLFLDNISFWKLFGFENINFVIDKYFTLVGKTNLGYVEFICDNNKNIDIYFGEWKTSSSKSTIFSGNGRNVVVEPIYNPDTGEDISTSLDFSYEPLYGIDRYINKVLIAPDLYTSLININTNYYSNEYYPEIIVLNPNTFHKKVNINLDSSSFEYKWSTEGSDFILVRYLEESNKKILQKIRIKGILSNTQSFNKMSIDFKDIKKLSLGYIMSNFKSFNSENELDRDHLGFKIIDNKTYYYDEDSKLVKGLININNSLFYFDPIEFNLVTGWQTINGKKYYFDINTGAALTSYKIINGKHFYFNNDGVMQLGVFKGPDGFEYFAPANTQNNNIEGQAIVYQSKFLTLNGKKYYFDNDSKAVTGWRIINNEKYYFNPNNAIAAVGLQVIDNNKYYFNPDTAIISKGWQTVNGSRYYFDTDTAIAFNGYKTIDGKHFYFDSDCVVKIGVFSTSNGFEYFAPANTYNNNIEGQAIVYQSKFLTLNGKKYYFDDNSKAVTGWQTIDSKKYYFNTNTAEAATGWQTIDGKKYYFNTNTAEAATGWQTIDGKKYYFNTNTAIASTGYTIINGKHFYFNTDGIMQIGVFKGPNGFEYFAPANTDANNIEGQAILYQNEFLTLNGKKYYFGSDSKAVTGWRIINNKKYYFNPNNAIAAIHLCTINNDKYYFSYDGILQNGYITIERNNFYFDANNESKMVTGVFKGPNGFEYFAPANTHNNNIEGQAIVYQNKFLTLNGKKYYFDNDSKAVTGWQTIDGKKYYFNLNTAEAATGWQTIDGKKYYFNLNTAEAATGWQTIDGKKYYFNTNTFIASTGYTSINGKHFYFNTDGIMQIGVFKGPNGFEYFAPANTHNNNIEGQAILYQNKFLTLNGKKYYFGSDSKAVTGLRTIDGKKYYFNTNTAVAVTGWQTINGKKYYFNTNTSIASTGYTIISGKHFYFNTDGIMQIGVFKGPDGFEYFAPANTDANNIEGQAIRYQNRFLYLHDNIYYFGNNSKAATGWVTIDGNRYYFEPNTAMGANGYKTIDNKNFYFRNGLPQIGVFKGSNGFEYFAPANTDANNIEGQAIRYQNRFLHLLGKIYYFGNNSKAVTGWQTINGKVYYFMPDTAMAAAGGLFEIDGVIYFFGVDGVKAPGIYG

SEQ ID NO: 137 - protein, 2710 aa, Clostridium difficile; identical to SEQ ID NO: 136

SEQ ID NO: 138 - protein, 2710 aa, Clostridium difficile; identical to SEQ ID NO: 88

SEQ ID NO: 139 - protein, 2710 aa, Clostridium difficile; identical to SEQ ID NO: 97

SEQ ID NO: 140 - protein, 2710 aa, Clostridium difficile
MSLISKEELIKLAYSIRPRENEYKTILTNLDEYNKLTTNNNENKYLQLKKLNESIDVFMNKYKTSSRNRALSNLKKDILKEVILIKNSNTSPVEKNLHFVWIGGEVSDIALEYIKQWADINAEYNIKLWYDSEAFLVNTLKKAIVESSTTEALQLLEEEIQNPQFDNMKFYKKRMEFIYDRQKRFINYYKSQINKPTVPTIDDIIKSHLVSEYNRDETVLESYRTNSLRKINSNHGIDIRANSLFTEQELLNIYSQELLNRGNLAAASDIVRLLALKNFGGVYLDVDMLPGIHSDLFKTISRPSSIGLDRWEMIKLEAIMKYKKYINNYTSENFDKLDQQLKDNFKLIIESKSEKSEIFSKLENLNVSDLEIKIAFALGSVINQALISKQGSYLTNLVIEQVKNRYQFLNQHLNPAIESDNNFTDTTKIFHDSLFNSATAENSMFLTKIAPYLQVGFMPEARSTISLSGPGAYASAYYDFINLQENTIEKTLKASDLIEFKFPENNLSQLTEQEINSLWSFDQASAKYQFEKYVRDYTGGSLSEDNGVDFNKNTALDKNYLLNNKIPSNNVEEAGSKNYVHYIIQLQGDDISYEATCNLFSKNPKNSIIIQRNMNESAKSYFLSDDGESILELNKYRIPERLKNKEKVKVTFIGHGKDEFNTSEFARLSVDSLSNEISSFLDTIKLDISPKNVEVNLLGCNMFSYDFNVEETYPGKLLLSIMDKITSTLPDVNKNSITIGANQYEVRINSEGRKELLAHSGKWINKEEAIMSDLSSKEYIFFDSIDNKLKAKSKNIPGLASISEDIKTLLLDASVSPDTKFILNNLKLNIESSIGDYIYYEKLEPVKNIIHNSIDDLIDEFNLLENVSDELYELKKLNNLDEKYLISFEDISKNNSTYSVRFINKSNGESVYVETEKEIFSKYSEHITKEISTIKNSIITDVNGNLLDNIQLDHTSQVNTLNAAFFIQSLIDYSSNKDVLNDLSTSVKVQLYAQLFSTGLNTIYDSIQLVNLISNAVNDTINVLPTITEGIPIVSTILDGINLGAAIKELLDEHDPLLKKELEAKVGVLAINMSLSIAATVASIVGIGAEVTIFLLPIAGISAGIPSLVNNELILHDKATSVVNYFNHLSESKKYGPLKTEDDKILVPIDDLVISEIDFNNNSIKLGTCNILAMEGGSGHTVTGNIDHFFSSPSISSHIPSLSIYSAIGIETENLDFSKKIMMLPNAPSRVFWWETGAVPGLRSLENDGTRLLDSIRDLYPGKFYWRFYAFFDYAITTLKPVYEDTNIKIKLDKDTRNFIMPTITTNEIRNKLSYSFDGAGGTYSLLLSSYPISTNINLSKDDLWIFNIDNEVREISIENGTIKKGKLIKDVLSKIDINKNKLIIGNQTIDFSGDIDNKDRYIFLTCELDDKISLIIEINLVAKSYSLLLSGDKNYLISNLSNTIEKINTLGLDSKNIAYNYTDESNNKYFGAISKTSQKSIIHYKKDSKNILEFYNDSTLEFNSKDFIAEDINVFMKDDINTITGKYYVDNNTDKSIDFSISLVSKNQVKVNGLYLNESVYSSYLDFVKNSDGHHNTSNFMNLFLDNISFWKLFGFENINFVIDKYFTLVGKTNLGYVEFICDNNKNIDIYFGEWKTSSSKSTIFSGNGRNVVVEPIYNPNTGEDISTSLDFSYEPLYGIDRYINKVLIAPDLYTSLININTNYYSNEYYPEIIVLNPNTFHKKVNINLDSSSFEYKWSTEGSDFILVRYLEESNKKILQKIRIKGILSNTQSFNKMSIDFKDIKKLSLGYIMSNFKSFNSENELDRDHLGFKIIDNKTYYYDEDSKLVKGLININNSLFYFDPIEFNLVTGWQTINGKKYYFDINTGAALTSYKIINGKHFYFNNDGVMQLGVFKGPDGFEYFAPANTQNNNIEGQAIVYQSKFLTLNGKKYYFDNNSKAVTGWRIINNEKYYFNPNNAIAAVGLQVIDNNKYYFNPDTAIISKGWQTVNGSRYYFDTDTAIAFNGYKTIDGKHFYFDSDCVVKIGVFSTSNGFEYFAPANTYNNNIEGQAIVYQSKFLTLNGKKYYFDNNSKAVTGWQTIDSKKYYFNTNTAEAATGWQTIDGKKYYFNTNTAEAATGWQTIDGKKYYFNTNTAIASTGYTIINGKHFYFNTDGIMQIGVFKGPNGFEYFAPANTDANNIEGQAILYQNEFLTLNGKKYYFGSDSKAVTGWRIINNKKYYFNPNNAIAAIHLCTINNDKYYFSYDGILQNGYITIERNNFYFDANNESKMVTGVFKGPNGFEYFAPANTHNNNIEGQAIVYQNKFLTLNGKKYYFDNDSKAVTGWQTIDGKKYYFNLNTAEAATGWQTIDGKKYYFNLNTAEAATGWQTIDGKKYYFNTNTFIASTGYTSINGKHFYFNTDGIMQIGVFKGPNGFEYFAPANTDANNIEGQAILYQNKFLTLNGKKYYFGSDSKAVTGLRTIDGKKYYFNTNTAVAVTGWQTINGKKYYFNTNTSIASTGYTIISGKHFYFNTDGIMQIGVFKGPDGFEYFAPANTDANNIEGQAIRYQNRFLYLHDNIYYFGNNSKAATGWVTIDGNRYYFEPNTAMGANGYKTIDNKNFYFRNGLPQIGVFKGSNGFEYFAPANTDANNIEGQAIRYQNRFLHLLGKIYYFGNNSKAVTGWQTINGKVYYFMPDTAMAAAGGLFEIDGVIYFFGVDGVKAPGIYG

SEQ ID NO: 141 - protein, 2366 aa, Clostridium difficile; identical to SEQ ID NO: 111

SEQ ID NO: 142 - protein, 2366 aa, Clostridium difficile
MSLVNRKQLEKMANVRFRTQEDEYVAILDALEEYHNMSENTVVEKYLKLKDINSLTDIYIDTYKKSGRNKALKKFKEYLVTEVLELKNNNLTPVEKNLHFVWIGGQINDTAINYINQWKDVNSDYNVNVFYDSNAFLINTLKKTVVESAINDTLESFRENLNDPRFDYNKFFRKRMEIIYDKQKNFINYYKAQREENPELIIDDIVKTYLSNEYSKEIDELNTYIEESLNKITQNSGNDVRNFEEFKNGESFNLYEQELVERWNLAAASDILRISALKEIGGMYLDVDMLPGIQPDLFESIEKPSSVTVDFWEMTKLEAIMKYKEYIPEYTSEHFDMLDEEVQSSFESVLASKSDKSEIFSSLGDMEASPLEVKIAFNSKGIINQGLISVKDSYCSNLIVKQIENRYKILNNSLNPAISEDNDFNTTTNTFIDSIMAEANADNGRFMMELGKYLRVGFFPDVKTTINLSGPEAYAAAYQDLLMFKEGSMNIHLIEADLRNFEISKTNISQSTEQEMASLWSFDDARAKAQFEEYKRNYFEGSLGEDDNLDFSQNIVVDKEYLLEKISSLARSSERGYIHYIVQLQGDKISYEAACNLFAKTPYDSVLFQKNIEDSEIAYYYNPGDGEIQEIDKYKIPSIISDRPKIKLTFIGHGKDEFNTDIFAGFDVDSLSTEIEAAIDLAKEDISPKSIEINLLGCNMFSYSINVEETYPGKLLLKVKDKISELMPSISQDSIIVSANQYEVRINSEGRRELLDHSGEWINKEESIIKDISSKEYISFNPKENKITVKSKNLPELSTLLQEIRNNSNSSDIELEEKVMLTECEINVISNIDTQIVEERIEEAKNLTSDSINYIKDEFKLIESISDALCDLKQQNELEDSHFISFEDISETDEGFSIRFINKETGESIFVETEKTIFSEYANHITEEISKIKGTIFDTVNGKLVKKVNLDTTHEVNTLNAAFFIQSLIEYNSSKESLSNLSVAMKVQVYAQLFSTGLNTITDAAKVVELVSTALDETIDLLPTLSEGLPIIATIIDGVSLGAAIKELSETSDPLLRQEIEAKIGIMAVNLTTATTAIITSSLGVASGFSILLVPLAGISAGIPSLVNNELVLRDKATKVVDYFKHVSLVETEGVFTLLDDKIMMPQDDLVISEIDFNNNSIVLGKCEIWRMEGGSGHTVTDDIDHFFSAPSITYREPHLSIYDVLEVQKEELDLSKDLMVLPNAPNRVFAWETGWTPGLRSLENDGTKLLDRIRDNYEGEFYWRYFAFIADALITTLKPRYEDTNIRINLDSNTRSFIVPIITTEYIREKLSYSFYGSGGTYALSLSQYNMGINIELSESDVWIIDVDNVVRDVTIESDKIKKGDLIEGILSTLSIEENKIILNSHEINFSGEVNGSNGFVSLTFSILEGINAIIEVDLLSKSYKLLISGELKILMLNSNHIQQKIDYIGFNSELQKNIPYSFVDSEGKENGFINGSTKEGLFVSELPDVVLISKVYMDDSKPSFGYYSNNLKDVKVITKDNVNILTGYYLKDDIKISLSLTLQDEKTIKLNSVHLDESGVAEILKFMNRKGSTNTSDSLMSFLESMNIKSIFVNFLQSNIKFILDANFIISGTTSIGQFEFICDENDNIQPYFIKFNTLETNYTLYVGNRQNMIVEPNYDLDDSGDISSTVINFSQKYLYGIDSCVNKVVISPNIYTDEINITPVYETNNTYPEVIVLDANYINEKINVNINDLSIRYVWSNDGNDFILMSTSEENKVSQVKIRFVNVFKDKTLANKLSFNFSDKQDVPVSEIILSFTPSYYEDGLIGYDLGLVSLYNEKFYINNFGMMVSGLIYINDSLYYFKPPVNNLITGFVTVGDDKYYFNPINGGAASIGETIIDDKNYYFNQSGVLQTGVFSTEDGFKYFAPANTLDENLEGEAIDFTGKLIIDENIYYFDDNYRGAVEWKELDGEMHYFSPETGKAFKGLNQIGDDKYYFNSDGVMQKGFVSINDNKHYFDDSGVMKVGYTEIDGKHFYFAENGEMQIGVFNTEDGFKYFAHHNEDLGNEEGEEISYSGILNFNNKIYYFDDSFTAVVGWKDLEDGSKYYFDEDTAEAYIGLSLINDGQYYFNDDGIMQVGFVTINDKVFYFSDSGIIESGVQNIDDNYFYIDDNGIVQIGVFDTSDGYKYFAPANTVNDNIYGQAVEYSGLVRVGEDVYYFGETYTIETGWIYDMENESDKYYFNPETKKACKGINLIDDIKYYFDEKGIMRTGLISFENNNYYFNENGEMQFGYINIEDKMFYFGEDGVMQIGVFNTPDGFKYFAHQNTLDENFEGESINYTGWLDLDEKRYYFTDEYIAATGSVIIDGEEYYFDPDTAQLVISE

SEQ ID NO: 143 - protein, 2366 aa, Clostridium difficile
MSLVNRKQLEKMANVRFRTQEDEYVAILDALEEYHNMSENTVVEKYLKLKDINSLTDIYIDTYKKSGRNKALKKFKEYLVTEVLELKNNNLTPVEKNLHFVWIGGQINDTAINYINQWKDVNSDYNVNVFYDSNAFLINTLKKTVVESAINDTLESFRENLNDPRFDYNKFFRKRMEIIYDKQKNFINYYKAQREENPELIIDDIVKTYLSNEYSKEIDELNTYIEESLNKITQNSGNDVRNFEEFKNGESFNLYEQELVERWNLAAASDILRISALKEIGGMYLDVDMLPGIQPDLFESIEKPSSVTVDFWEMTKLEAIMKYKEYIPEYTSEHFDMLDEEVQSSFESVLASKSDKSEIFSSLGDMEASPLEVKIAFNSKGIINQGLISVKDSYCSNLIVKQIENRYKILNNSLNPAISEDNDFNTTTNTFIDSIMAEANADNGRFMMELGKYLRVGFFPDVKTTINLSGPEAYAAAYQDLLMFKEGSMNIHLIEADLRNFEISKTNISQSTEQEMASLWSFDDSRAKAQFEEYKRNYFEGSLGEDDNLDFSQNIVVDKEYLLEKISSLARSSERGYIHYIVQLQGDKISYEAACNLFAKTPYDSVLFQKNIEDSEIAYYYNPGDGEIQEIDKYKIPSIISDRPKIKLTFIGHGKDEFNTDIFAGFDVDSLSTEIEAAIDLAKEDISPKSIEINLLGCNMFSYSINVEETYPGKLLLKVKDKISELMPSISQDSIIVSANQYEVRINSEGRRELLDHSGEWINKEESIIKDISSKEYISFNPKENKITVKSKNLPELSTLLQEIRNNSNSSDIELEEKVMLTECEINVISNIDTQIVEERIEEAKNLTSDSINYIKDEFKLIESISDALCDLKQQNELEDSHFISFEDISETDEGFSIRFINKETGESIFVETEKTIFSEYANHITEEISKIKGTIFDTVNGKLVKKVNLDTTHEVNTLNAAFFIQSLIEYNSSKESLSNLSVAMKVQVYAQLFSTGLNTITDAAKVVELVSTALDETIDLLPTLSEGLPIIATIIDGVSLGAAIKELSETSDPLLRQEIEAKIGIMAVNLTTATTAIITSSLGVASGFSILLVPLAGISAGIPSLVNNELVLRDKATKVVDYFKHVSLVETEGVFTLLDDKIMMPQDDLVISEIDFNNNSIVLGKCEIWRMEGGSGHTVTDDIDHFFSAPSITYREPHLSIYDVLEVQKEELDLSKDLMVLPNAPNRVFAWETGWTPGLRSLENDGTKLLDRIRDNYEGEFYWRYFAFIADALITTLKPRYEDTNIRINLDSNTRSFIVPIITTEYIREKLSYSFYGSGGTYALSLSQYNMGINIELSESDVWIIDVDNVVRDVTIESDKIKKGDLIEGILSTLSIEENKIILNSHEINFSGEVNGSNGFVSLTFSILEGINAIIEVDLLSKSYKLLISGELKILMLNSNHIQQKIDYIGFNSELQKNIPYSFVDSEGKENGFINGSTKEGLFVSELPDVVLISKVYMDDSKPSFGYYSNNLKDVKVITKDNVNILTGYYLKDDIKISLSLTLQDEKTIKLNSVHLDESGVAEILKFMNRKGSTNTSDSLMSFLESMNIKSIFVNFLQSNIKFILDANFIISGTTSIGQFEFICDENDNIQPYFIKFNTLETNYTLYVGNRQNMIVEPNYDLDDSGDISSTVINFSQKYLYGIDSCVNKVVISPNIYTDEINITPVYETNNTYPEVIVLDANYINEKINVNINDLSIRYVWSNDGNDFILMSTSEENKVSQVKIRFVNVFKDKTLANKLSFNFSDKQDVPVSEIILSFTPSYYEDGLIGYDLGLVSLYNEKFYINNFGMMVSGLIYINDSLYYFKPPVNNLITGFVTVGDDKYYFNPINGGAASIGETIIDDKNYYFNQSGVLQTGVFSTEDGFKYFAPANTLDENLEGEAIDFTGKLIIDENIYYFDDNYRGAVEWKELDGEMHYFSPETGKAFKGLNQIGDDKYYFNSDGVMQKGFVSINDNKHYFDDSGVMKVGYTEIDGKHFYFAENGEMQIGVFNTEDGFKYFAHHNEDLGNEEGEEISYSGILNFNNKIYYFDDSFTAVVGWKDLEDGSKYYFDEDTAEAYIGLSLINDGQYYFNDDGIMQVGFVTINDKVFYFSDSGIIESGVQNIDDNYFYIDDNGIVQIGVFDTSDGYKYFAPANTVNDNIYGQAVEYSGLVRVGEDVYYFGETYTIETGWIYDMENESDKYYFNPETKKACKGINLIDDIKYYFDEKGIMRTGLISFENNNYYFNENGEMQFGYINIEDKMFYFGEDGVMQIGVFNTPDGFKYFAHQNTLDENFEGESINYTGWLDLDEKRYYFTDEYIAATGSVIIDGEEYYFDPDTAQLVISE

SEQ ID NO: 144 - protein, 2366 aa, Clostridium difficile; identical to SEQ ID NO: 143

SEQ ID NO: 145 - protein, 2366 aa, Clostridium difficile; identical to SEQ ID NO: 143

SEQ ID NO: 146 - protein, 2366 aa, Clostridium difficile
MSLVNRKQLEKMANVRFRTQEDEYVAILDALEEYHNMSENTVVEKYLKLKDINSLTDIYIDTYKKSGRNKALKKFKEYLVTEVLELKNNNLTPVEKNLHFVWIGGQINDTAINYINQWKDVNSDYNVNVFYDSNAFLINTLKKTVVESAINDTLESFRENLNDPRFDYNKFFRKRMEIIYDKQKNFINYYKAQREENPELIIDDIVKTYLSNEYSKEIDELNTYIEESLNKITQNSGNDVRNFEEFKNGESFNLYEQELVERWNLAAASDILRISALKEIGGMYLDVDMLPGIQPDLFESIEKPSSVTVDFWEMTKLEAIMKYKEYIPEYTSEHFDMLDEEVQSSFESVLASKSDKSEIFSSLGDMEASPLEVKIAFNSKGIINQGLISVKDSYCSNLIVKQIENRYKILNNSLNPAISEDNDFNTTTNTFIDSIMAEANADNGRFMMELGKYLRVGFFPDVKTTINLSGPEAYAAAYQDLLMFKEGSMNIHLIEADLRNFEIFKTNISQSTEQEMASLWSFDDSRAKAQFEEYKRNYFEGSLGEDDNLDFSQNIVVDKEYLLEKISSLARSSERGYIHYIVQLQGDKISYEAACNLFAKTPYDSVLFQKNIEDSEIAYYYNPGDGEIQEIDKYKIPSIISDRPKIKLTFIGHGKDEFNTDIFAGFDVDSLSTEIEAAIDLAKEDISPKSIEINLLGCNMFSYSINVEETYPGKLLLKVKDKISELMPSISQDSIIVSANQYEVRINSEGRRELLDHSGEWINKEESIIKDISSKEYISFNPKENKITVKSKNLPELSTLLQEIRNNSNSSDIELEEKVMLTECEINVISNIDTQIVEERIEEAKNLTSDSINYIKDEFKLIESISDALCDLKQQNELEDSHFISFEDISETDEGFSIRFINKETGESIFVETEKTIFSEYANHITEEISKIKGTIFDTVNGKLVKKVNLDTTHEVNTLNAAFFIQSLIEYNSSKESLSNLSVAMKVQVYAQLFSTGLNTITDAAKVVELVSTALDETIDLLPTLSEGLPIIATIIDGVSLGAAIKELSETSDPLLRQEIEAKIGIMAVNLTTATTAIITSSLGVASGFSILLVPLAGISAGIPSLVNNELVLRDKATKVVDYFKHVSLVETEGVFTLLDDKIMMPQDDLVISEIDFNNNSIVLGKCEIWRMEGGSGHTVTDDIDHFFSAPSITYREPHLSIYDVLEVQKEELDLSKDLMVLPNAPNRVFAWETGWTPGLRSLENDGTKLLDRIRDNYEGEFYWRYFAFIADALITTLKPRYEDTNIRINLDSNTRSFIVPIITTEYIREKLSYSFYGSGGTYALSLSQYNMGINIELSESDVWIIDVDNVVRDVTIESDKIKKGDLIEGILSTLSIEENKIILNSHEINFSGEVNGSNGFVSLTFSILEGINAIIEVDLLSKSYKLLISGELKILMLNSNHIQQKIDYIGFNSELQKNIPYSFVDSEGKENGFINGSTKEGLFVSELPDVVLISKVYMDDSKPSFGYYSNNLKDVKVITKDNVNILTGYYLKDDIKISLSLTLQDEKTIKLNSVHLDESGVAEILKFMNRKGSTNTSDSLMSFLESMNIKSIFVNFLQSNIKFILDANFIISGTTSIGQFEFICDENDNIQPYFIKFNTLETNYTLYVGNRQNMIVEPNYDLDDSGDISSTVINFSQKYLYGIDSCVNKVVISPNIYTDEINITPVYETNNTYPEVIVLDANYINEKINVNINDLSIRYVWSNDGNDFILMSTSEENKVSQVKIRFVNVFKDKTLANKLSFNFSDKQDVPVSEIILSFTPSYYEDGLIGYDLGLVSLYNEKFYINNFGMMVSGLIYINDSLYYFKPPVNNLITGFVTVGDDKYYFNPINGGAASIGETIIDDKNYYFNQSGVLQTGVFSTEDGFKYFAPANTLDENLEGEAIDFTGKLIIDENIYYFDDNYRGAVEWKELDGEMHYFSPETGKAFKGLNQIGDDKYYFNSDGVMQKGFVSINDNKHYFDDSGVMKVGYTEIDGKHFYFAENGEMQIGVFNTEDGFKYFAHHNEDLGNEEGEEISYSGILNFNNKIYYFDDSFTAVVGWKDLEDGSKYYFDEDTAEAYIGLSLINDGQYYFNDDGIMQVGFVTINDKVFYFSDSGIIESGVQNIDDNYFYIDDNGIVQIGVFDTSDGYKYFAPANTVNDNIYGQAVEYSGLVRVGEDVYYFGETYTIETGWIYDMENESDKYYFNPETKKACKGINLIDDIKYYFDEKGIMRTGLISFENNNYYFNENGEMQFGYINIEDKMFYFGEDGVMQIGVFNTPDGFKYFAHQNTLDENFEGESINYTGWLDLDEKRYYFTDEYIAATGSVIIDGEEYYFDPDTAQLVISE

SEQ ID NO: 147 - protein, 2366 aa, Clostridium difficile; identical to SEQ ID NO: 146

SEQ ID NO: 148 - protein, 2710 aa, Clostridium difficile; identical to SEQ ID NO: 88

SEQ ID NO: 149 - protein, 2710 aa, Clostridium difficile; identical to SEQ ID NO: 88

SEQ ID NO: 150 - protein, 2710 aa, Clostridium difficile
MSLISKEELIKLAYSIRPRENEYKTILTNLDEYNKLTTNNNENKYLQLKKLNESIDVFMNKYKTSSRNRALSNLKKDILKEVILIKNSNTSPVEKNLHFVWIGGEVSDIALEYIKQWADINAEYNIKLWYDSEAFLVNTLKKAIVESSTTEALQLLEEEIQNPQFDNMKFYKKRMEFIYDRQKRFINYYKSQINKPTVPTIDDIIKSHLVSEYNRDETVLESYRTNSLRKINSNHGIDIRANSLFTEQELLNIYSQELLNRGNLAAASDIVRLLALKNFGGVYLDVDMLPGIHSDLFKTISRPSSIGLDRWEMIKLEAIMKYKKYINNYTSENFDKLDQQLKDNFKLIIESKSEKSEIFSKLENLNVSDLEIKIAFALGSVINQALISKQGSYLTNLVIEQVKNRYQFLNQHLNPAIESDNNFTDTTKIFHDSLFNSATAENSMFLTKIAPYLQVGFMPEARSTISLSGPGAYASAYYDFINLQENTIEKTLKASDLIEFKFPENNLSQLTEQEINSLWSFDQASAKYQFEKYVRDYTGGSLSEDNGVDFNKNTALDKNYLLNNKIPSNNVEEAGSKNYVHYIIQLQGDDISYEATCNLFSKNPKNSIIIQRNMNESAKSYFLSDDGESILELNKYRIPERLKNKEKVKVTFIGHGKDEFNTSEFARLSVDSLSNEISSFLDTIKLDISPKNVEVNLLGCNMFSYDFNVEETYPGKLLLSIMDKITSTLPDVNKNSITIGANQYEVRINSEGRKELLAHSGKWINKEEAIMSDLSSKEYIFFDSIDNKLKAKSKNIPGLASISEDIKTLLLDASVSPDTKFILNNLKLNIESSIGDYIYYEKLEPVKNIIHNSIDDLIDEFNLLENVSDELYELKKLNNLDEKYLISFEDISKNNSTYSVRFINKSNGESVYVETEKEIFSKYSEHITKEISTIKNSIITDVNGNLLDNIQLDHTSQVNTLNAAFFIQSLIDYSSNKDVLNDLSTSVKVQLYAQLFSTGLNTIYDSIQLVNLISNAVNDTINVLPTITEGIPIVSTILDGINLGAAIKELLDEHDPLLKKELEAKVGVLAINMSLSIAATVASIVGIGAEVTIFLLPIAGISAGIPSLVNNELILHDKATSVVNYFNHLSESKKYGPLKTEDDKILVPIDDLVISEIDFNNNSIKLGTCNILAMEGGSGHTVTGNIDHFFSSPSISSHIPSLSIYSAIGIETENLDFSKKIMMLPNAPSRVFWWETGAVPGLRSLENDGTRLLDSIRDLYPGKFYWRFYAFFDYAITTLKPVYEDTNIKIKLDKDTRNFIMPTITTNEIRNKLSYSFDGAGGTYSLLLSSYPISTNINLSKDDLWIFNIDNEVREISIENGTIKKGKLIKDVLSKIDINKNKLIIGNQTIDFSGDIDNKDRYIFLTCELDDKISLIIEINLVAKSYSLLLSGDKNYLISNLSNTIEKINTLGLDSKNIAYNYTDESNNKYFGAISKTSQKSIIHYKKDSKNILEFYNDSTLEFNSKDFIAEDINVFMKDDINTITGKYYVDNNTDKSIDFSISLVSKNQVKVNGLYLNESVYSSYLDFVKNSDGHHNTSNFMNLFLDNISFWKLFGFENINFVIDKYFTLVGKTNLGYVEFICDNNKNIDIYFGEWKTSSSKSTIFSGNGRNVVVEPIYNPDTGEDISTSLDFSYEPLYGIDRYINKVLIAPDLYTSLININTNYYSNEYYPEIIVLNPNTFHKKVNINLDSSSFEYKWSTEGSDFILVRYLEESNKKILQKIRIKGILSNTQSFNKMSIDFKDIKKLSLGYIMSNFKSFNSENELDRDHLGFKIIDNKTYYYDEDSKLVKGLININNSLFYFDPIEFNLVTGWQTINGKKYYFDINTGAALTSYKIINGKHFYFNNDGVMQLGVFKGPDGFEYFAPANTQNNNIEGQAIVYQSKFLTLNGKKYYFDNDSKAVTGWRIINNEKYYFNPNNAIAAVGLQVIDNNKYYFNPDTAIISKGWQTVNGSRYYFDTDTAIAFNGYKTIDGKHFYFDSDCVVKIGVFSTSNGFEYFAPANTYNNNIEGQAIVYQSKFLTLNGKKYYFDDNSKAVTGWQTIDSKKYYFNTNTAEAATGWQTIDGKKYYFNTNTAEAATGWQTIDGKKYYFNTNTAIASTGYTIINGKHFYFNTDGIMQIGVFKGPNGFEYFAPANTDANNIEGQAILYQNEFLTLNGKKYYFGSDSKAVTGWRIINNKKYYFNPNNAIAAIHLCTINNDKYYFSYDGILQNGYITIERNNFYFDANNESKMVTGVFKGPNGFEYFAPANTYNNNIEGQAIVYQNKFLTLNGKKYYFDNDSKAVTGWQTIDGKKYYFNLNTAEAATGWQTIDGKKYYFNLNTAEAATGWQTIDGKKYYFNTNTFIASTGYTSINGKHFYFNTDGIMQIGVFKGPNGFEYFAPANTHNNNIEGQAILYQNKFLTLNGKKYYFGSDSKAVTGLRTIDGKKYYFNTNTAVAVTGWQTINGKKYYFNTNTSIASTGYTIISGKHFYFNTDGIMQIGVFKGPDGFEYFAPANTDANNIEGQAIRYQNRFLYLHDNIYYFGNNSKAATGWVTIDGNRYYFEPNTAMGANGYKTIDNKNFYFRNGLPQIGVFKGSNGFEYFAPANTDANNIEGQAIRYQNRFLHLLGKIYYFGNNSKAVTGWQTINGKVYYFMPDTAMAAAGGLFEIDGVIYFFGVDGVKAPGIYG

SEQ ID NO: 151 - protein, 2710 aa, Clostridium difficile
MSLISKEELIKLAYSIRPRENEYKTILTNLDEYNKLTTNNNENKYLQLKKLNESIDVFMNKYKTSSRNRALSNLKKDILKEVILIKNSNTSPVEKNLHFVWIGGEVSDIALEYIKQWADINAEYNIKLWYDSEAFLVNTLKKAIVESSTTEALQLLEEEIQNPQFDNMKFYKKRMEFIYDRQKRFINYYKSQINKPTVPTIDDIIKSHLVSEYNRDETVLESYRTNSLRKINSNHGIDIRANSLFTEQELLNIYSQGLLNRGNLAAASDIVRLLALKNFGGVYLDVDMLPGIHSDLFKTISRPSSIGLDRWEMIKLEAIMKYKKYINNYTSENFDKLDQQLKDNFKLIIESKSEKSEIFSKLENLNVSDLEIKIAFALGSVINQALISKQGSYLTNLVIEQVKNRYQFLNQHLNPAIESDNNFTDTTKIFHDSLFNSATAENSMFLTKIAPYLQVGFMPEARSTISLSGPGAYASAYYDFINLQENTIEKTLKASDLIEFKFPENNLSQLTEQEINSLWSFDQASAKYQFEKYVRDYTGGSLSEDNGVDFNKNTALDKNYLLNNKIPSNNVEEAGSKNYVHYIIQLQGDDISYEATCNLFSKNPKNSIIIQRNMNESAKSYFLSDDGESILELNKYRIPERLKNKEKVKVTFIGHGKDEFNTSEFARLSVDSLSNEISSFLDTIKLDISPKNVEVNLLGCNMFSYDFNVEETYPGKLLLSIMDKITSTLPDVNKNSITIGANQYEVRINSEGRKELLAHSGKWINKEEAIMSDLSSKEYIFFDSIDNKLKAKSKNIPGLASISEDIKTLLLDASVSPDTKFILNNLKLNIESSIGDYIYYEKLEPVKNIIHNSIDDLIDEFNLLENVSDELYELKKLNNLDEKYLISFEDISKNNSTYSVRFINKSNGESVYVETEKEIFSKYSEHITKEISTIKNSIITDVNGNLLDNIQLDHTSQVNTLNAAFFIQSLIDYSSNKDVLNDLSTSVKVQLYAQLFSTGLNTIYDSIQLVNLISNAVNDTINVLPTITEGIPIVSTILDGINLGAAIKELLDEHDPLLKKELEAKVGVLAINMSLSIAATVASIVGIGAEVTIFLLPIAGISAGIPSLVNNELILHDKATSVVNYFNHLSESKKYGPLKTEDDKILVPIDDLVISEIDFNNNSIKLGTCNILAMEGGSGHTVTGNIDHFFSSPSISSHIPSLSIYSAIGIETENLDFSKKIMMLPNAPSRVFWWETGAVPGLRSLENDGTRLLDSIRDLYPGKFYWRFYAFFDYAITTLKPVYEDTNIKIKLDKDTRNFIMPTITTNEIRNKLSYSFDGAGGTYSLLLSSYPISTNINLSKDDLWIFNIDNEVREISIENGTIKKGKLIKDVLSKIDINKNKLIIGNQTIDFSGDIDNKDRYIFLTCELDDKISLIIEINLVAKSYSLLLSGDKNYLISNLSNIIEKINTLGLDSKNIAYNYTDESNNKYFGAISKTSQKSIIHYKKDSKNILEFYNDSTLEFNSKDFIAEDINVFMKDDINTITGKYYVDNNTDKSIDFSISLVSKNQVKVNGLYLNESVYSSYLDFVKNSDGHHNTSNFMNLFLDNISFWKLFGFENINFVIDKYFTLVGKTNLGYVEFICDNNKNIDIYFGEWKTSSSKSTIFSGNGRNVVVEPIYNPDTGEDISTSLDFSYEPLYGIDRYINKVLIAPDLYTSLININTNYYSNEYYPEIIVLNPNTFHKKVNINLDSSSFEYKWSTEGSDFILVRYLEESNKKILQKIRIKGILSNTQSFNKMSIDFKDIKKLSLGYIMSNFKSFNSENELDRDHLGFKIIDNKTYYYDEDSKLVKGLININNSLFYFDPIEFNLVTGWQTINGKKYYFDINTGAALISYKIINGKHFYFNNDGVMQLGVFKGPDGFEYFAPANTQNNNIEGQAIVYQSKFLTLNGKKYYFDNDSKAVTGWRIINNEKYYFNPNNAIAAVGLQVIDNNKYYFNPDTAIISKGWQTVNGSRYYFDTDTAIAFNGYKTIDGKHFYFDSDCVVKIGVFSTSNGFEYFAPANTYNNNIEGQAIVYQSKFLTLNGKKYYFDNNSKAVTGWQTIDSKKYYFNTNTAEAATGWQTIDGKKYYFNTNTAEAATGWQTIDGKKYYFNTNTAIASTGYTIINGKHFYFNTDGIMQIGVFKGPNGFEYFAPANTDANNIEGQAILYQNEFLTLNGKKYYFGSDSKAVTGWRIINNKKYYFNPNNAIAAIHLCTINNDKYYFSYDGILQNGYITIERNNFYFDANNESKMVTGVFKGPNGFEYFAPANTHNNNIEGQAIVYQNKFLTLNGKKYYFDNDSKAVTGWQTIDGKKYYFNLNTAEAATGWQTIDGKKYYFNLNTAEAATGWQTIDGKKYYFNTNTFIASTGYTSINGKHFYFNTDGIMQIGVFKGPNGFEYFAPANTHNNNIEGQAILYQNKFLTLNGKKYYFGSDSKAVTGLRTIDGKKYYFNTNTAVAVTGWQTINGKKYYFNTNTSIASTGYTIISGKHFYFNTDGIMQIGVFKGPDGFEYFAPANTDANNIEGQAIRYQNRFLYLHDNIYYFGNNSKAATGWVTIDGNRYYFEPNTAMGANGYKTIDNKNFYFRNGLPQIGVFKGSNGFEYFAPANTDANNIEGQAIRYQNRFLHLLGKIYYFGNNSKAVTGWQTINGKVYYFMPDTAMAAAGGLFEIDGVIYFFGVDGVKAPGIYG

SEQ ID NO: 152 - protein, 2710 aa, Clostridium difficile; identical to SEQ ID NO: 98

SEQ ID NO: 153 - protein, 2710 aa, Clostridium difficile
MSLISKEELIKLAYSIRPRENEYKTILTNLDEYNKLTTNNNENKYLQLKKLNESIDVFMNKYKNSSRNRALSNLKKDILKEVILIKNSNTSPVEKNLHFVWIGGEVSDIALEYIKQWADINAEYNIKLWYDSEAFLVNTLKKAIVESSTTEALQLLEEEIQNPQFDNMKFYKKRMEFIYDRQKRFVNYYKSQINKPTVPTIDDIIKSHLVSEYNRDETLLESYRTNSLRKINSNHGIDIRANSLFTEQELLNIYSQELLNRGNLAAASDIVRLLALKNFGGVYLDVDMLPGIHSDLFKTISRPSSIGLDRWEMIKLEAIMKYKKYINNYTSENFDKLDQQLKDNFKLIIESKSEKSEIFSKLENLNVSDLEIKIAFALGSVINQALISKQGSYLTNLVIEQVKNRYQFLNQHLNPAIESDNNFTDTTKIFHDSLFNSATAENSMFLTKIAPYLQVGFMPEARSTISLSGPGAYASAYYDFINLQENTIEKTLKASDLIEFKFPENNLSQLTEQEINSLWSFDQASAKYQFEKYVRDYTGGSLSEDNEVDFNKNTALDKNYLLNNKIPSNNVEEAGSKNYVHYIIQLQGDDISYEATCNLFSKNPKNSIIIQRNMNESAKSYFLSDDGESILELNKYRIPERLKNKEKVKVTFIGHGKDEFNTSEFARLSVDSLSNEISSFLDTIKLDISPKNVEVNLLGCNMFSYDFNVEETYPGKLLLSIMDKITSTLPDVNKDSITIGANQYEVRINSEGRKELLAHSGKWINKEEAIMSDLSSKEYIFFDSIDNKLKAKSKNIPGLASISEDIKTLLLDTSVSPDTKFILNNLKLNIESSVGDYIYYEKLEPVKNIIHNSIDDLIDEFNLLENVSDELYELKKLNNLDEKYLISFEDISKNNSTYSVRFINKSNGESVYVETEKEIFSKYSEHITKEISTIKNSIITDVNGNLLDNIQLDHTSQVNTLNAAFFIQSLIDYSSNKDLLNDLSTSVKVQLYAQLFSTGLNTIYDSIQLVNLISNAVNDTINVLPTITEGIPIVSTILDGINLGAAIKELLDEHDPLLKKELEAKVGVLAINMSLSIAATVASIVGIGAEVTIFLLPIAGISAGIPSLVNNELILHDKATSVVNYFNHLSESKEYGPLKTEDDKILVPIDDLVISEIDFNNNAIKLGTCNILAMEGGSGHTVTGNIDHFFSSPSISSHIPSLSIYSAIGIKTENLDFSKKIMMLPNAPSRVFWWETGAVPGLRSLENNGTKLLDSIRDLYPGKFYWRFYAFFDYAITTLKPVYEDTNIKIKLDKDTRNFIMPTITTNEIRNKLSYSFDGAGGTYSLLLSSYPISTNINLSKDDLWIFNIDNEVREISIENGTIKKGKLIKDVLSKIDINKNKLIIGNQTIDFSGDIDNKDRYIFLTCELDDKISLIIEINLVAKSYSLLLSGDKNYLISNLSNTIEKINTLGLDSKNIAYNYTDESNNKYFGAISKTSQKSIIHYKKDSKNILEFYNGSTLEFNSKDFIAEDINVFMKDDINTITGKYYVDNNTDKSIDFSISLVSKNQAKVNGLYLNESVYSSYLDFVKNADGHHNTSNFMNLFLDNISFWKLFGFENINFVVDKYFTLVGKTNLGYVEFICDNNKNIDIYFGEWKTSSSKSTIFSGNGRNVVVEPIYNPDTGEDISTSLDFSYEPLYGIDRYINKVLIAPDLYTSLININTNYYSNEYYPEIIVLNPNTFHKKVNINLDSSSFEYKWSTEGSDFILVRYLEESNKKILQKIRIKGILSNTQSFNKMSIDFKDIKKLSLVYIMSNFKSFNSENELDRDHLGFKIIDNKTYYYDEASKLVKGLININNSLFYFDPIESNLVTGWQTINGKKYYFDINTGAALTSYKIINGKHFYFNNNGVMQLGVFKGPDRFEYFAPANTQNNNIEGQAIVYQSKFLTLNGKKYYFDNDSKAVTGWRIINNEKYYFNPNNAIAAVGLQVIDNNKYYFNPDTAIISKGWQTVNGSRYYFDTDTAIAFNGYKTIDGKHFYFDSDCVVKIGVFSGSNGFEYFAPANTYNNNIEGQAIVYQSKFLTLNGKKYYFDNNSKAVTGWQTIDSKKYYFNTNTAEAATGWQTIDGKKYYFNTNTAEAATGWQTIDGKKYYFNTNTSIASTGYTIINGKHFYFNTDGIMQIGVFKGPNGFEYFAPANTDANNIEGQAILYQNKFLTLNGKKYYFASDSKAVTGWRIINNKKYYFNPNNAIAATHLYTINNDKYYFSYDGILQNGYITIERNNFYFDANNESKMVTGVFKGPNGFEYFAPANTHNNNIEGQAIVYQNKFLTLNGKKYYFDNDSKAVTGWQTIDGKKYYFNLNTAVAVTGWQTIDGKKYYFNLNTAEAATGWQTIDGKKYYFNTNTFIASTGYTSINGKHFYFNTDGIMQIGVFKGPNGFEYFAPANTHNNNIEGQAILYQNKFLTLNGKKYYFASDSKAVTGLRTIDGKKYYFNTNTAVAATGWQTINGKKYYFNTNTSIASTGYTIINGKHFYFNTDGIMQIGVFKGPDGFEYFAPANTDANNIEGQAIRYQNRFLYLHDNIYYFGNNSKAATGWVTIDGRRYYFEPNTAIGANGYKIIDNKNFYFRNGLPQIGVFKGPNGFEYFAPANTDANNIDGQAIRYQNRFLHLLGNIYYFGNNSKAVTGWQTINGNMYYFMPDTAMAAAGGLFEIDGVIYFFGVDGVKAPGIYG

SEQ ID NO: 154 - protein, 2710 aa, Clostridium difficile; identical to SEQ ID NO: 88

SEQ ID NO: 155 - protein, 2710 aa, Clostridium difficile; identical to SEQ ID NO: 98

SEQ ID NO: 156 - protein, 2710 aa, Clostridium difficile; identical to SEQ ID NO: 151

SEQ ID NO: 157 - protein, 2710 aa, Clostridium difficile
MSLISKEELIKLAYSIRPRENEYKTILTNLDEYNKLTTNNNENKYLQLKKLNESIDVFMNKYKTSSRNRALSNLKKDILKEVILIKNSNTSPVEKNLHFVWIGGEVSDIALEYIKQWADINAEYNIKLWYDSEAFLVNTLKKAIVESSTTEALQLLEEEIQNPQFDNMKFYKKRMEFIYDRQKRFINYYKSQINKPTVPTIDDIIKSHLVSEYNRDETVLESYRTNSLRKINSNHGIDIRANSLFTEQELLNIYSQELLNRGNLAAASDIVRLLALKNFGGVYLDVDMLPGIHSDLFKTISRPSSIGLDRWEMIKLEAIMKYKKYINNYTSENFDKLDQQLKDNFKLIIESKSEKSEIFSKLENLNVSDLEIKIAFALGSVINQALISKQGSYLTNLVIEQVKNRYQFLNQHLNPAIESDNNFTDTTKIFHDSLFNSATAENSMFLTKIAPYLQVGFMPEARSTISLSGPGAYASAYYDFINLQENTIEKTLKASDLIEFKFPENNLSQLTEQEINSLWSFDQASAKYQFEKYVRDYTGGSLSEDNGVDFNKNTALDKNYLLNNKIPSNNVEEAGSKNYVHYIIQLQGDDISYEATCNLFSKNPKNSIIIQRNMNESAKSYFLSDDGESILELNKYRIPERLKNKEKVKVTFIGHGKDEFNTSEFARLSVDSLSNEISSFLDTIKLDISPKNVEVNLLGCNMFSYDFNVEETYPGKLLLSIMDKITSTLPDVNKNSITIGANQYEVRINSEGRKELLAHSGKWINKEEAIMSDLSSKEYIFFDSIDNKLKAKSKNIPGLASISEDIKTLLLDASVSPDTKFILNNLKLNIESSIGDYIYYEKLEPVKNIIHNSIDDLIDEFNLLENVSDELYELKKLNNLDEKYLISFEDISKNNSTYSVRFINKSNGESVYVETEKEIFSKYSEHITKEISTIKNSIITDVNGNLLDNIQLDHTSQVNTLNAAFFIQSLIDYSSNKDVLNDLSTSVKVQLYAQLFSTGLNTIYDSIQLVNLISNAVNDTINVLPTITEGIPIVSTILDGINLGAAIKELLDEHDPLLKKELEAKVGVLAINMSLSIAATVASIVGIGAEVTIFLLPIAGISAGIPSLVNNELILHDKATSVVNYFNHLSESKKYGPLKTEDDKILVPIDDLVISEIDFNNNSIKLGTCNILAMEGGSGHTVTGNIDHFFSSPSISSHIPSLSIYSAIGIETENLDFSKKIMMLPNAPSRVFWWETGAVPGLRSLENDGTRLLDSIRDLYPGKFYWRFYAFFDYAITTLKPVYENTNIKIKLDKDTRNFIMPTITTNEIRNKLSYSFDGAGGTYSLLLSSYPISTNINLSKDDLWIFNIDNEVREISIENGTIKKGKLIKDVLSKIDINKNKLIIGNQTIDFSGDIDNKDRYIFLTCELDDKISLIIEINLVAKSYSLLLSGDKNYLISNLSNTIEKINTLGLDSKNIAYNYTDESNNKYFGAISKTSQKSIIHYKKDSKNILEFYNDSTLEFNSKDFIAEDINVFMKDDINTITGKYYVDNNTDKSIDFSISLVSKNQVKVNGLYLNESVYSSYLDFVKNSDGHHNTSNFMNLFLDNISFWKLFGFENINFVIDKYFTLVGKTNLGYVEFICDNNKNIDIYFGEWKTSSSKSTIFSGNGRNVVVEPIYNPDTGEDISTSLDFSYEPLYGIDRYINKVLIAPDLYTSLININTNYYSNEYYPEIIVLNPNTFHKKVNINLDSSSFEYKWSTEGSDFILVRYLEESNKKILQKIRIKGILSNTQSFNKMSIDFKDIKKLSLGYIMSNFKSFNSENELDRDHLGFKIIDNKTYYYDEDSKLVKGLININNSLFYFDPIEFNLVTGWQTINGKKYYFDINTGAALTSYKIINGKHFYFNNDGVMQLGVFKGPDGFEYFAPANTQNNNIEGQAIVYQSKFLTLNGKKYYFDNDSKAVTGWRIINNEKYYFNPNNAIAAVGLQVIDNNKYYFNPDTAIISKGWQTVNGSRYYFDTDTAIAFNGYKTIDGKHFYFDSDCVVKIGVFSTSNGFEYFAPANTYNNNIEGQAIVYQSKFLTLNGKKYYFDDNSKAVTGWQTIDSKKYYFNTNTAEAATGWQTIDGKKYYFNTNTAEAATGWQTIDGKKYYFNTNTSIASTGYTSINGKHFYFNTDGIMQIGVFKGPNGFEYFAPANTDANNIEGQAILYQNEFLTLNGKKYYFGSDSKAVTGWRIINNKKYYFNPNNAIAAIHLCTINNDKYYFSYDGILQNGYITIERNNFYFDANNESKMVTGVFKGPNGFEYFAPANTHNNNIEGQAIVYQNKFLTLNGKKYYFDNDSKAVTGWQTIDGKKYYFNLNTAEAATGWQTIDGKKYYFNLNTAEAATGWQTIDGKKYYFNTNTFIASTGYTSINGKHFYFNTDGIMQIGVFKGPNGFEYFAPANTHNNNIEGQAILYQNKFLTLNGKKYYFGSDSKAVTGLRTIDGKKYYFNTNTAVAVTGWQTINGKKYYFNTNTSIASTGYTIISGKHFYFNTDGIMQIGVFKGPDGFEYFAPANTDANNIEGQAIRYQNRFLYLHDNIYYFGNNSKAATGWVTIDGNRYYFEPNTAMGANGYKTIDNKNFYFRNGLPQIGVFKGSNGFEYFAPANTDANNIEGQAIRYQNRFLHLLGKIYYFGNNSKAVTGWQTINGKVYYFMPDTAMAAAGGLFEIDGVIYFFGVDGVKAPGIYG

SEQ ID NO: 158 - protein, 2366 aa, Clostridium difficile; identical to SEQ ID NO: 111

SEQ ID NO: 159 - protein, 2366 aa, Clostridium difficile; identical to SEQ ID NO: 111

SEQ ID NO: 160 - protein, 2366 aa, Clostridium difficile
MSLVNRKQLEKMANVRFRTQEDEYVAILDALEEYHNMSENTVVEKYLKLKDINSLTDIYIDTYKKSGRNKALKKFKEYLVTEVLELKNNNLTPVEKNLHFVWIGGQINDTAINYINQWKDVNSDYNVNVFYDSNAFLINTLKKTVVESAINDTLESFRENLNDPRFDYNKFFRKRMEIIYDKQKNFINYYKAQREENPELIIDDIVKTYLSNEYSKEIDELNTYIEESLNKITQNSGNDVRNFEEFKNGESFNLYEQELVERWNLAAASDILRISALKEIGGMYLDVDMLPGIQPGLFESIEKPSSVTVDFWEMTKLEAIMKYKEYIPEYTSEHFDMLDEEVQSSFESVLASKSDKSEIFSSLGDMEASPLEVKIAFNSKGIINQGLISVKDSYCSNLIVKQIENRYKILNNSLNPAISEDNDFNTTTNTFIDSIMAEANADNGRFMMELGKYLRVGFFPDVKTTINLSGPEAYAAAYQDLLMFKEGSMNIHLIEADLRNFEISKTNISQSTEQEMASLWSFDDARAKAQFEEYKRNYFEGSLGEDDNLDFSQNIVVDKEYLLEKISSLARSSERGYIHYIVQLQGDKISYEAACNLFAKTPYDSVLFQKNIEDSEIAYYYNPGDGEIQEIDKYKIPSIISDRPKIKLTFIGHGKDEFNTDIFAGFDVDSLSTEIEAAIDLAKEDISPKSIEINLLGCNMFSYSINVEETYPGKLLLKVKDKISELMPSISQDSIIVSANQYEVRINSEGRRELLDHSGEWINKEESIIKDISSKEYISFNPKENKITVKSKNLPELSTLLQEIRNNSNSSDIELEEKVMLTECEINVISNIDTQIVEERIEEAKNLTSDSINYIKDEFKLIESISDALCDLKQQNELEDSHFISFEDISETDEGFSIRFINKETGESIFVETEKTIFSEYANHITEEISKIKGTIFDTVNGKLVKKVNLDTTHEVNTLNAAFFIQSLIEYNSSKESLSNLSVAMKVQVYAQLFSTGLNTITDAAKVVELVSTALDETIDLLPTLSEGLPIIATIIDGVSLGAAIKELSETSDPLLRQEIEAKIGIMAVNLTTATTAIITSSLGVASGFSILLVPLAGISAGIPSLVNNELVLRDKATKVVDYFKHVSLVETEGVFTLLDDKIMMPQDDLVISEIDFNNNSIVLGKCEIWRMEGGSGHTVTDDIDHFFSAPSITYREPHLSIYDVLEVQKEELDLSKDLMVLPNAPNRVFAWETGWTPGLRSLENDGTKLLDRIRDNYEGEFYWRYFAFIADALITTLKPRYEDTNIRINLDSNTRSFIVPIITTEYIREKLSYSFYGSGGTYALSLSQYNMGINIELSESDVWIIDVDNVVRDVTIESDKIKKGDLIEGILSTLSIEENKIILNSHEINFSGEVNGSNGFVSLTFSILEGINAIIEVDLLSKSYKLLISGELKILMLNSNHIQQKIDYIGFNSELQKNIPYSFVDSEGKENGFINGSTKEGLFVSELPDVVLISKVYMDDSKPSFGYYSNNLKDVKVITKDNVNILTGYYLKDDIKISLSLTLQDEKTIKLNSVHLDESGVAEILKFMNRKGNTNTSDSLMSFLESMNIKSIFVNFLQSNIKFILDANFIISGTTSIGQFEFICDENDNIQPYFIKFNTLETNYTLYVGNRQNMIVEPNYDLDDSGDISSTVINFSQKYLYGIDSCVNKVVISPNIYTDEINITPVYETNNTYPEVIVLDANYINEKINVNINDLSIRYVWSNDGNDFILMSTSEENKVSQVKIRFVNVFKDKTLANKLSFNFSDKQDVPVSEIILSFTPSYYEDGLIGYDLGLVSLYNEKFYINNFGMMVSGLIYINDSLYYFKPPVNNLITGFVTVGDDKYYFNPINGGAASIGETIIDDKNYYFNQSGVLQTGVFSTEDGFKYFAPANTLDENLEGEAIDFTGKLIIDENIYYFDDNYRGAVEWKELDGEMHYFSPETGKAFKGLNQIGDYKYYFNSDGVMQKGFVSINDNKHYFDDSGVMKVGYTEIDGKHFYFAENGEMQIGVFNTEDGFKYFAHHNEDLGNEEGEEISYSGILNFNNKIYYFDDSFTAVVGWKDLEDGSKYYFDEDTAEAYIGLSLINDGQYYFNDDGIMQVGFVTINDKVFYFSDSGIIESGVQNIDDNYFYIDDNGIVQIGVFDTSDGYKYFAPANTVNDNIYGQAVEYSGLVRVGEDVYYFGETYTIETGWIYDMENESDKYYFNPETKKACKGINLIDDIKYYFDEKGIMRTGLISFENNNYYFNENGEMQFGYINIEDKMFYFGEDGVMQIGVFNTPDGFKYFAHQNTLDENFEGESINYTGWLDLDEKRYYFTDEYIAATGSVIIDGEEYYFDPDTAQLVISE

SEQ ID NO: 161 - protein, 2366 aa, Clostridium difficile; identical to SEQ ID NO: 160

SEQ ID NO: 162 - protein, 2366 aa, Clostridium difficile; identical to SEQ ID NO: 160

SEQ ID NO: 163 - protein, 2366 aa, Clostridium difficile
MSLVNRKQLEKMANVRFRTQEDEYVAILDALEEYHNMSENTVVEKYLKLKDINSLTDIYIDTYKKSGRNKALKKFKEYLVTEVLELKNNNLTPVEKNLHFVWIGGQINDTAINYINQWKDVNSDYNVNVFYDSNAFLINTLKKTIVESAINDTLESFRENLNNPRFDYNKFFRKRMEIIYDKQKNFINYYKAQREENPELIIDDIVKIYLSNEYSKEIDELNTYIEESLNKIKQNSGNDVRNFEEFKNGESFKLYEQELVERWNLAAASDILRISALKEIGGMYLDVDMLPGIQPGLFESIEKPSSVTVDFWEMTKLEAIMKYKEYIPGYTSEHFDMLDEEVQSSFESALASKSDKSEIFSSLGDMEASPLEVKIAFNSKGIINQGLISVKDSYCSNLIVKQIENRYKILNNSLNPAISEDNDFNTTTNTFIDSIMAEANADNGRFMMELGKYLRVGFFPDVKTTVNLSGPEAYAAAYQDLLMFKEGSMNIHLIEADLRNFEISKTNISQSTEQEMASLWTFDDARAKVQFEEYKRNYFEGSLGEDDNLDFSQNIVVDKEYLLEKISSLARSSERGYIHYIVQLQGDKISYEAACNLFAKTPYDSILFQKNIENSEVAYYYNPGDGEIQEIDKYRIPSIISDRPKIKLTFIGHGKDEFNTDIFAGLDVDSLSTEIETAIDLAKEDISSKSIEINLLGCNMFSYSINVEETYPGKLLLKVKDKISELMPSISQDSIIVSANQYEVRINNEGRRELLDHSGEWINKEESIIKDISSKEYISFNPKENKITVKSKNLPELSTLLQEIRNNSNLSDIELEEKVMLAECEINVISNIDTQIVEERIEEAKNLTSDSINYIKNEFKLIESISDSLYDLKQQNELDDSHFISFEDISKTEDGFSIRFINKETGESIFVETEKEIFSEYANHIRGEISNIKDTIFDTVNGKLVKKVNLDAIHEVNTLNAAFFIQSLIGYSSSKESLSNLSVAMKVQVYAQLFSTGLNTITDAAKVVELVSTALDETIDLLPTLSEGLPVIATIIDGVSLGAAIKELSETSDPLLRQEIEAKIGIMAVNLTAATTAIITSSLGVASGFSILLVPLAGISAGIPSLVNNELVLRDKATKVVDYFKHISLVETEGAFTLLDDKIMIPQDDLVISEIDFNNNSIVLGKCEIWRMEGGSGHTVTNDIDHFFSSPTITYIKPHLSIYDVLEVQKEELDLSKDLMVLPNAPNRVFAWETGWTPGLRSLENEGTKLLDRIRDHYKGEFYWRYFAFIADALITTLKPRYEDTNIRINLDSNNRSFIVPIITTEHIREKLSYSFHGSGGTYALSLSQYNMGINIELSESDVWIIDVDNVVRDVTIDSDKIKKGDLIEGILSTLSIEDNKIILNHHEINFSGDVNGSNGFISLTFSILEGINAIIEVDLLSKSYKLLISGELKILMLNSNHIQQKIDYIGFNSELQKNIPYSFVDSEGKENGFINGSTKEGLFVSELPDVVLISKVYMDDSKPSFGYYSNNLKDVKVITKDNVNILTGYYLKDDIKISLSFTLQDEKTIKLNGVHLDESGVAEILKFMNKKGSTNTSDSLMSFLESVNIKSIFVNFLQSKINFILDANFIISGTTSIGQFEFICDENDNIQPYFIKFNTLETTYTLYVGNRQNMIVEPNYDLDDSGDISSTVINFSQKYLYGIDSCVNKVVISPNIYTDEINITPVYETNNNYPEVIVLDANYINEKINVNINDLSIRYVWSNDGNDFILMSTSEENKVSQVKIRFVNVFKDKTLANKLSFNFSDKQDVPVSEIISAFTPSYYEDGLIGYDLGLVSLYNEKFYINNFGMMVSGLIYINDSLYYFKPPVNNLITGFVTVGDDKYYFNPTNGGAASIGETIINDKNYYFNQSGILQTGVFSTEDGLKYFAPANTLDENLEGEAIDFTGKLIIDENIYYFEDNYRGAVEWKELDGEMYYFSPETGKAFKGLNQIGDDKYYFNSDGIMQKGFVSINDKKYYFDDSGVMKVGYIEIDGKYFYFAENGEMQIGVFNTSDGFKYFAHHNEDLGNEEGEAISYSGILNFNNKIYYFDYSFTAVVGWKDLEDGSKYYFDEDTAEAYVGLSLINDGQYYFNDDGIMQVGFVTINNKVFYFSDSGIIESGVQNIDDNYFYIDEKGIVQIGVFDTSDEYKYFAPANTVNDNIYGQAVDYSGLVRVGEDIYYFGETYTIETGWIYDMENESDKYYFNPETKKACKGINLIDDIKYYFDENGIMRTGLISFENNDYYFNENGEMQFGYINIEDKMFYFGEDGVMQIGVFNTQDGFKYFAHQNTLDENFEGESINYTGWLDLDEKRYYFTDEYIAATGSVIIDGEEYYFDPDTAQLVISE

SEQ ID NO: 164 - protein, 2366 aa, Clostridium difficile; identical to SEQ ID NO: 163

SEQ ID NO: 165 - protein, 2366 aa, Clostridium difficile; identical to SEQ ID NO: 163

SEQ ID NO: 166 - protein, 2366 aa, Clostridium difficile; identical to SEQ ID NO: 163

SEQ ID NO: 167 - protein, 2366 aa, Clostridium difficile
MSLVNRKQLEKMANVRFRTQEDEYVAILDALEEYHNMSENTVVEKYLKLKDINSLTDIYIDTYKKSGRNKALKKFKEYLVIEVLELKNNNLTPVEKNLHFVWIGGQINDTAINYINQWKDVNSDYNVNVFYDSNAFLINTLKKTIVESAINDTLESFRENLNNPRFDYNKFFRKRMEIIYDKQKNFINYYKAQREENPELIIDDIVKIYLSNEYSKEIDELNTYIEESLNKIKQNSGNDVRNFEEFKNGESFKLYEQELVERWNLAAASDILRISALKEIGGMYLDVDMLPGIQPGLFESIEKPSSVTVDFWEMTKLEAIMKYKEYIPGYTSEHFDMLDEEVQSSFESALASKSDKSEIFSSLGDMEASPLEVKIAFNSKGIINQGLISVKDSYCSNLIVKQIENRYKILNNSLNPAISEDNDFNTTTNTFIDSIMAEANADNGRFMMELGKYLRVGFFPDVKTTVNLSGPEAYAAAYQDLLMFKEGSMNIHLIEADLRNFEISKTNISQSTEQEMASLWTFDDARAKVQFEEYKRNYFEGSLGEDDNLDFSQNIVVDKEYLLEKISSLARSSERGYIHYIVQLQGDKISYEAACNLFAKTPYDSILFQKNIENSEVAYYYNPGDGEIQEIDKYRIPSIISDRPKIKLTFIGHGKDEFNTDIFAGLDVDSLSTEIETAIDLAKEDISSKSIEINLLGCNMFSYSINVEETYPGKLLLKVKDKISELMPSISQDSIIVSANQYEVRINNEGRRELLDHSGEWINKEESIIKDISSKEYISFNPKENKITVKSKNLPELSTLLQEIRNNSNLSDIELEEKVMLAECEINVISNIDTQIVEERIEEAKNLTSDSINYIKNEFKLIESISDSLYDLKQQNELDDSHFISFEDISKTEDGFSIRFINKETGESIFVETEKEIFSEYANHIRGEISNIKDTIFDTVNGKLVKKVNLDAIHEVNTLNAAFFIQSLIGYSSSKESLSNLSVAMKVQVYAQLFSTGLNTITDAAKVVELVSTALDETIDLLPTLSEGLPVIATIIDGVSLGAAIKELSETSDPLLRQEIEAKIGIMAVNLTAATTAIITSSLGVASGFSILLVPLAGISAGIPSLVNNELVLRDKATKVVDYFKHISLVETEGAFTLLDDKIMIPQDDLVISEIDFNNNSIVLGKCEIWRMEGGSGHTVTNDIDHFFSSPTITYIKPHLSIYDVLEVQKEELDLSKDLMVLPNAPNRVFAWETGWTPGLRSLENEGTKLLDRIRDHYKGEFYWRYFAFIADALITTLKPRYEDTNIRINLDSNNRSFIVPIITTEHIREKLSYSFHGSGGTYALSLSQYNMGINIELSESDVWIIDVDNVVRDVTIDSDKIKKGDLIEGILSTLSIEDNKIILNHHEINFSGDVNGSNGFISLTFSILEGINAIIEVDLLSKSYKLLISGELKILMLNSNHIQQKIDYIGFNSELQKNIPYSFVDSEGKENGFINGSTKEGLFVSELPDVVLISKVYMDDSKPSFGYYSNNLKDVKVITKDNVNILTGYYLKDDIKISLSFTLQDEKTIKLNGVHLDESGVAEILKFMNKKGSTNTSDSLMSFLESVNIKSIFVNFLQSKINFILDANFIISGTTSIGQFEFICDENDNIQPYFIKFNTLETTYTLYVGNRQNMIVEPNYDLDDSGDISSTVINFSQKYLYGIDSCVNKVVISPNIYTDEINITPVYETNNNYPEVIVLDANYINEKINVNINDLSIRYVWSNDGNDFILMSTSEENKVSQVKIRFVNVFKDKTLANKLSFNFSDKQDVPVSEIISAFTPSYYEDGLIGYDLGLVSLYNEKFYINNFGMMVSGLIYINDSLYYFKPPVNNLITGFVTVGDDKYYFNPTNGGAASIGETIINDKNYYFNQSGILQTGVFSTEDGLKYFAPANTLDENLEGEAIDFTGKLIIDENIYYFEDNYRGAVEWKELDGEMYYFSPETGKAFKGLNQIGDDKYYFNSDGIMQKGFVSINDKKYYFDDSGVMKVGYIEIDGKYFYFAENGEMQIGVFNTSDGFKYFAHHNEDLGNEEGEAISYSGILNFNNKIYYFDYSFTAVVGWKDLEDGSKYYFDEDTAEAYVGLSLINDGQYYFNDDGIMQVGFVTINNKVFYFSDSGIIESGVQNIDDNYFYIDEKGIVQIGVFDTSDEYKYFAPANTVNDNIYGQAVDYSGLVRVGEDIYYFGETYTIETGWIYDMENESDKYYFNPETKKACKGINLIDDIKYYFDENGIMRTGLISFENNDYYFNENGEMQFGYINIEDKMFYFGEDGVMQIGVFNTQDGFKYFAHQNTLDENFEGESINYTGWLDLDEKRYYFTDEYIAATGSVIIDGEEYYFDPDTAQLVISE

SEQ ID NO: 168 - protein, 2710 aa, Clostridium difficile; identical to SEQ ID NO: 92

SEQ ID NO: 169 - protein, 2710 aa, Clostridium difficile
MSLISKEELIKLAYSIRPRENEYKTILTNLDEYNKLTTNNNENKYLQLKKLNESIDVFMNKYKNSSRNRALSNLKKDILKEVILIKNSNTSPVEKNLHFVWIGGEVSDIALEYIKQWADINAEYNIKLWYDSEAFLVNTLKKAIVESSTTEALQLLEEEIQNPQFDNMKFYKKRMEFIYDRQKRFVNYYKSQINKPTVPTIDDIIKSHLVSEYNRDETLLESYRTNSLRKINSNHGIDIRANSLFTEQELLNIYSQELLNRGNLAAASDIVRLLALKNFGGVYLDVDMLPGIHSDLFKTISRPSSIGLDRWEMIKLEAIMKYKKYINNYTSENFDKLDQQLKDNFKLIIESKSEKSEIFSKLENLNVSDLEIKIAFALGSVINQALISKQGSYLTNLVIEQVKNRYQFLNQHLNPAIESDNNFTDTTKIFHDSLFNSATAENSMFLTKIAPYLQVGFMPEARSTISLSGPGAYASAYYDFINLQENTIEKTLKASDLIEFKFPENNLSQLTEQEINSLWSFDQASAKYQFEKYVRDYTGGSLSEDNEVDFNKNTALDKNYLLNNKIPSNNVEEAGSKNYVHYIIQLQGDDISYEATCNLFSKNPKNSIIIQRNMNESAKSYFLSDDGESILELNKYRIPERLKNKEKVKVTFIGHGKDEFNTSEFARLSVDSLSNEISSFLDTIKLDISPKNVEVNLLGCNMFSYDFNVEETYPGKLLLSIMDKITSTLPDVNKDSITIGANQYEVRINSEGRKELLAHSGKWINKEEAIMSDLSSKEYIFFDSIDNKLKAKSKNIPGLASISEDIKTLLLDTSVSPDTKFILNNLKLNIESSVGDYIYYEKLEPVKNIIHNSIDDLIDEFNLLENVSDELYELKKLNNLDEKYLISFEDISKNNSTYSVRFINKSNGESVYVETEKEIFSKYSEHITKEISTIKNSIITDVNGNLLDNIQLDHTSQVNTLNAAFFIQSLIDYSSNKDLLNDLSTSVKVQLYAQLFSTGLNTIYDSIQLVNLISNAVNDTINVLPTITEGIPIVSTILDGINLGAAIKELLDEHDPLLKKELEAKVGVLAINMSLSIAATVASIVGIGAEVTIFLLPIAGISAGIPSLVNNELILHDKATSVVNYFNHLSESKEYGPLKTEDDKILVPIDDLVISEIDFNNNAIKLGTCNILAMEGGSGHTVTGNIDHFFSSPSISSHIPSLSIYSAIGIKTENLDFSKKIMMLPNAPSRVFWWETGAVPGLRSLENNGTKLLDSIRDLYPGKFYWRFYAFFDYAITTLKPVYEDTNIKIKLDKDTRNFIMPTITTNEIRNKLSYSFDGAGGTYSLLLSSYPISTNINLSKDDLWIFNIDNEVREISIENGTIKKGKLIKDVLSKIDINKNKLIIGNQTIDFSGDIDNKDRYIFLTCELDDKISLIIEINLVAKSYSLLLSGDKNYLISNLSNTIEKINTLGLDSKNIAYNYTDESNNKYFGAISKTSQKSIIHYKKDSKNILEFYNGSTLEFNSKDFIAEDINVFMKDDINTITGKYYVDNNTDKSIDFSISLVSKNQAKVNGLYLNESVYSSYLDFVKNADGHHNTSNFMNLFLDNISFWKLFGFENINFVVDKYFTLVGKTNLGYVEFICDNNKNIDIYFGEWKTSSSKSTIFSGNGRNVVVEPIYNPDTGEDISTSLDFSYEPLYGIDRYINKVLIAPDLYTSLININTNYYSNEYYPEIIVLNPNTFHKKVNINLDSSSFEYKWSTEGSDFILVRYLEESNKKILQKIRIKGILSNTQSFNKMSIDFKDIKKLSLVYIMSNFKSFNSENELDRDHLGFKIIDNKTYYYDEASKLVKGLININNSLFYFDPIESNLVTGWQTINGKKYYFDINTGAALTSYKIINGKHFYFNNNGVMQLGVFKGPDRFEYFAPANTQNNNIEGQAIVYQSKFLTLNGKKYYFDNDSKAVTGWRIINNEKYYFNPNNAIAAVGLQVIDNNKYYFNPDTAIISKGWQTVNGSRYYFDTDTAIAFNGYKTIDGKHFYFDSDCVVKIGVFSGSNGFEYFAPANTYNNNIEGQAIVYQSKFLTLNGKKYYFDNNSKAVTGWQTIDSKKYYFNTNTAEAATGWQTIDGKKYYFNTNTAEAATGWQTIDGKKYYFNTNTSIASTGYTIINGKHFYFNTDGIMQIGVFKGPDGFEYFAPANTDANNIEGQAILYQNKFLTLNGKKYYFASDSKAVTGWRIINNKKYYFNPNNAIAATHLYTINNDKYYFSYDGILQNGYITIERNNFYFDANNESKMVTGVFKGPNGFEYFAPANTHNNNIEGQAIVYQNKFLTLNGKKYYFDNDSKAVTGWQTIDGKKYYFNLNTAVAVTGWQTIDGKKYYFNTNTAEAATGWQTIDGKKYYFNTNTSIASTGYTIINGKHFYFNTDGIMQIGVFKGPDGFEYFAPANTDANNIEGQAILYQNKFLTLNGKKYYFASDSKAVTGLRTIDGKKYYFNTNTAEAATGWQTINGKKYYFNTNTSIASTGYTIINGKHFYFNTDGIMQIGVFKGPDGFEYFAPANTDANNIEGQAIRYQNRFLYLHDNIYYFGNNSKAATGWVTIDGRRYYFEPNTAIGANGYKIIDNKNFYFRNGLPQIGVFKGPNGFEYFAPANTDANNIDGQAIRYQNRFLHLLGNIYYFGNNSKAVTGWQTINGNMYYFMPDTAMAAAGGLFEIDGVIYFFGVDGVKAPGIYG

SEQ ID NO: 170 - protein, 2710 aa, Clostridium difficile
MSLISKEELIKLAYSIRPRENEYKTILTNLDEYNKLTTNNNENKYLQLKKLNESIDVFMNKYKNSSRNRALSNLKKDILKEVILIKNSNTSPVEKNLHFVWIGGEVSDIALEYIKQWADINAEYNIKLWYDSEAFLVNTLKKAIVESSTTEALQLLEEEIQNPQFDNMKFYKKRMEFIYDRQKRFVNYYKSQINKPTVPTIDDIIKSHLVSEYNRDETLLESYRTNSLRKINSNHGIDIRANSLFTEQELLNIYSQELLNRGNLAAASDIVRLLALKNFGGVYLDVDMLPGIHSDLFKTISRPSSIGLDRWEMIKLEAIMKYKKYINNYTSENFDKLDQQLKDNFKLIIESKSEKSEIFSKLENLNVSDLEIKIAFALGSVINQALISKQGSYLTNLVIEQVKNRYQFLNQHLNPAIESDNNFTDTTKIFHDSLFNSATAENSMFLTKIAPYLQVGFMPEARSTISLSGPGAYASAYYDFINLQENTIEKTLKASDLIEFKFPENNLSQLTEQEINSLWSFDQASAKYQFEKYVRDYTGGSLSEDNEVDFNKNTALDKNYLLNNKIPSNNVEEAGSKNYVHYIIQLQGDDISYEATCNLFSKNPKNSIIIQRNMNESAKSYFLSDDGESILELNKYRIPERLKNKEKVKVTFIGHGKDEFNTSEFARLSVDSLSNEISSFLDTIKLDISPKNVEVNLLGCNMFSYDFNVEETYPGKLLLSIMDKITSTLPDVNKDSITIGANQYEVRINSEGRKELLAHSGKWINKEEAIMSDLSSKEYIFFDSIDNKLKAKSKNIPGLASISEDIKTLLLDTSVSPDTKFILNNLKLNIESSVGDYIYYEKLEPVKNIIHNSIDDLIDEFNLLENVSDELYELKKLNNLDEKYLISFEDISKNNSTYSVRFINKSNGESVYVETEKEIFSKYSEHITKEISTIKNSIITDVNGNLLDNIQLDHTSQVNTLNAAFFIQSLIDYSSNKDLLNDLSTSVKVQLYAQLFSTGLNTIYDSIQLVNLISNAVNDTINVLPTITEGIPIVSTILDGINLGAAIKELLDEHDPLLKKELEAKVGVLAINMSLSIAATVASIVGIGAEVTIFLLPIAGISAGIPSLVNNELILHDKATSVVNYFNHLSESKEYGPLKTEDDKILVPIDDLVISEIDFNNNAIKLGTCNILAMEGGSGHTVTGNIDHFFSSPSISSHIPSLSIYSAIGIKTENLDFSKKIMMLPNAPSRVFWWETGAVPGLRSLENNGTKLLDSIRDLYPGKFYWRFYAFFDYAITTLKPVYEDTNIKIKLDKDTRNFIMPTITTNEIRNKLSYSFDGAGGTYSLLLSSYPISTNINLSKDDLWIFNIDNEVREISIENGTIKKGKLIKDVLSKIDINKNKLIIGNQTIDFSGDIDNKDRYIFLTCELDDKISLIIEINLVAKSYSLLLSGDKNYLISNLSNTIEKINTLGLDSKNIAYNYTDESNNKYFGAISKTSQKSIIHYKKDSKNILEFYNGSTLEFNSKDFIAEDINVFMKDDINTITGKYYVDNNTDKSIDFSISLVSKNQAKVNGLYLNESVYSSYLDFVKNADGHHNTSNFMNLFLDNISFWKLFGFENINFVVDKYFTLVGKTNLGYVEFICDNNKNIDIYFGEWKTSSSKSTIFSGNGRNVVVEPIYNPDTGEDISTSLDFSYEPLYGIDRYINKVLIAPDLYTSLININTNYYSNEYYPEIIVLNPNTFHKKVNINLDSSSFEYKWSTEGSDFILVRYLEESNKKILQKIRIKGILSNTQSFNKMSIDFKDIKKLSLVYIMSNFKSFNSENELDRDHLGFKIIDNKTYYYDEASKLVKGLININNSLFYFDPIESNLVTGWQTINGKKYYFDINTGAALTSYKIINGKHFYFNNNGVMQLGVFKGPDRFEYFAPANTQNNNIEGQAIVYQSKFLTLNGKKYYFDNDSKAVTGWRIINNEKYYFNPNNAIAAVGLQVIDNNKYYFNPDTAIISKGWQTVNGSRYYFDTDTAIAFNGYKTIDGKHFYFDSDCVVKIGVFSGSNGFEYFAPANTYNNNIEGQAIVYQSKFLTLNGKKYYFDNNSKAVTGWQTIDSKKYYFNTNTAEAATGWQTIDGKKYYFNTNTAEAATGWQTIDGKKYYFNTNTSIASTGYTIINGKHFYFNTDGIMQIGVFKGPNGFEYFAPANTDANNIEGQAILYQNKFLTLNGKKYYFASDSKAVTGWRIINNKKYYFNPNNAIAATHLYTINNDKYYFSYDGILQNGYITIERNNFYFDANNESKMVTGVFKGPNGFEYFAPANTHNNNIEGQAIVYQNKFLTLNGKKYYFDNDSKAVTGWQTIDGKKYYFNLNTAVAVTGWQTIDGKKYYFNTNTAEAATGWQTIDGKKYYFNTNTSIASTGYTIINGKHFYFNTDGIMQIGVFKGPDGFEYFAPANTDANNIEGQAILYQNKFLTLNGKKYYFASDSKAVTGLRTIDGKKYYFNTNTAEAATGWQTIDGKKYYFNTNTSIASTGYTIINDKHFYFNTDGIMQIGVFKGPDGFEYFAPANTDANNIEGQAIRYQNRFLYLHDNIYYFGNNSKAATGWVTIDGRRYYFEPNTAIGANGYKIIDNKNFYFRNGLPQIGVFKGPNGFEYFAPANTDANNIDGQAIRYQNRFLHLLGNIYYFGNNSKAVTGWQTINGNMYYFMPDTAMAAAGGLFEIDGVIYFFGVDGVKAPGIYG

SEQ ID NO: 171 - protein, 2710 aa, Clostridium difficile
MSLISKEELIKLAYSIRPRENEYKTILTNLDEYNKLTTNNNENKYLQLKKLNESIDVFMNKYKNSSRNRALSNLKKDILKEVILIKNSNTSPVEKNLHFVWIGGEVSDIALEYIKQWADINAEYNIKLWYDSEAFLVNTLKKAIVESSTTEALQLLEEEIQNPQFDNMKFYKKRMEFIYDRQKRFVNYYKSQINKPTVPTIDDIIKSHLVSEYNRDETLLESYRTNSLRKINSNHGIDIRANSLFTEQELLNIYSQELLNRGNLAAASDIVRLLALKNFGGVYLDVDMLPGIHSDLFKTISRPSSIGLDRWEMIKLEAIMKYKKYINNYTSENFDKLDQQLKDNFKLIIESKSEKSEIFSKLENLNVSDLEIKIAFALGSVINQALISKQGSYLTNLVIEQVKNRYQFLNQHLNPAIESDNNFTDTTKIFHDSLFNSATAENSMFLTKIAPYLQVGFMPEARSTISLSGPGAYASAYYDFINLQENTIEKTLKASDLIEFKFPENNLSQLTEQEINSLWSFDQASAKYQFEKYVRDYTGGSLSEDNEVDFNKNTALDKNYLLNNKIPSNNVEEAGSKNYVHYIIQLQGDDISYEATCNLFSKNPKNSIIIQRNMNESAKSYFLSDDGESILELNKYRIPERLKNKEKVKVTFIGHGKDEFNTSEFARLSVDSLSNEISSFLDTIKLDISPKNVEVNLLGCNMFSYDFNVEETYPGKLLLSIMDKITSTLPDVNKDSITIGANQYEVRINSEGRKELLAHSGKWINKEEAIMSDLSSKEYIFFDSIDNKLKAKSKNIPGLASISEDIKTLLLDTSVSPDTKFILNNLKLNIESSVGDYIYYEKLEPVKNIIHNSIDDLIDEFNLLENVSDELYELKKLNNLDEKYLISFEDISKNNSTYSVRFINKSNGESVYVETEKEIFSKYSEHITKEISTIKNSIITDVNGNLLDNIQLDHTSQVNTLNAAFFIQSLIDYSSNKDLLNDLSTSVKVQLYAQLFSTGLNTIYDSIQLVNLISNAVNDTINVLPTITEGIPIVSTILDGINLGAAIKELLDEHDPLLKKELEAKVGVLAINMSLSIAATVASIVGIGAEVTIFLLPIAGISAGIPSLVNNELILHDKATSVVNYFNHLSESKEYGPLKTEDDKILVPIDDLVISEIDFNNNAIKLGTCNILAMEGGSGHTVTGNIDHFFSSPSISSHIPSLSIYSAIGIKTENLDFSKKIMMLPNAPSRVFWWETGAVPGLRSLENNGTKLLDSIRDLYPGKFYWRFYAFFDYAITTLKPVYEDTNIKIKLDKDTRNFIMPTITTNEIRNKLSYSFDGAGGTYSLLLSSYPISTNINLSKDDLWIFNIDNEVREISIENGTIKKGKLIKDVLSKIDINKNKLIIGNQTIDFSGDIDNKDRYIFLTCELDDKISLIIEINLVAKSYSLLLSGDKNYLISNLSNTIEKINTLGLDSKNIAYNYTDESNNKYFGAISKTSQKSIIHYKKDSKNILEFYNGSTLEFNSKDFIAEDINVFMKDDINTITGKYYVDNNTDKSIDFSISLVSKNQAKVNGLYLNESVYSSYLDFVKNADGHHNTSNFMNLFLDNISFWKLFGFENINFVVDKYFTLVGKTNLGYVEFICDNNKNIDIYFGEWKTSSSKSTIFSGNGRNVVVEPIYNPDTGEDISTSLDFSYEPLYGIDRYINKVLIAPDLYTSLININTNYYSNEYYPEIIVLNPNTFHKKVNINLDSSSFEYKWSTEGSDFILVRYLEESNKKILQKIRIKGILSNTQSFNKMSIDFKDIKKLSLVYIMSNFKSFNSENELDRDHLGFKIIDNKTYYYDEASKLVKGLININNSLFYFDPIESNLVTGWQTINGKKYYFDINTGAALTSYKIINGKHFYFNNNGVMQLGVFKGPDRFEYFAPANTQNNNIEGQAIVYQSKFLTLNGKKYYFDNDSKAVTGWRIINNEKYYFNPNNAIAAVGLQVIDNNKYYFNPDTAIISKGWQTVNGSRYYFDTDTAIAFNGYKTIDGKHFYFDSDCVVKIGVFSGSNGFEYFAPANTYNNNIEGQAIVYQSKFLTLNGKKYYFDNNSKAVTGWQTIDSKKYYFNTNTAEAATGWQTIDGKKYYFNTNTAEAATGWQTIDGKKYYFNTNTSIASTGYTIINGKHFYFNTDGIMQIGVFKGPDGFEYFAPANTDANNIEGQAILYQNKFLTLNGKKYYFASDSKAVTGWRIINNKKYYFNPNNAIAATHLYTINNDKYYFSYDGILQNGYITIERNNFYFDANNESKMVTGVFKGPNGFEYFAPANTHNNNIEGQAIVYQNKFLTLNGKKYYFDNDSKAVTGWQTIDGKKYYFNLNTAVAVTGWQTIDGKKYYFNTNTAEAATGWQTIDGKKYYFNTNTSIASTGYTIINGKHFYFNTDGIMQIGVFKGPDGFEYFAPANTDANNIEGQAILYQNKFLTLNGKKYYFASDSKAVTGLRTIDGKKYYFNTNTAEAATGWQTIDGKKYYFNTNTSIASTGYTIINDKHFYFNTDGIMQIGVFKGPDGFEYFAPANTDANNIEGQAIRYQNRFLYLHDNIYYFGNNSKAATGWVTIDGRRYYFEPNTAIGANGYKIIDNKNFYFRNGLPQIGVFKGPNGFEYFAPANTDANNIDGQAIRYQNRFLHLLGNIYYFGNNSKAVTGWQTINGNMYYFMPDTAMAAAGGLFEIDGVIYFFGVDGVKAPGIYG

SEQ ID NO: 172 - protein, 2710 aa, Clostridium difficile; identical to SEQ ID NO: 171

SEQ ID NO: 173 - protein, 2366 aa, Clostridium difficile; identical to SEQ ID NO: 115

SEQ ID NO: 174 - protein, 2366 aa, Clostridium difficile
MSLVNRKQLEKMANVRFRTQEDEYVAILDALEEYHNMSENTVVEKYLKLKDINSLTDIYIDTYKKSGRNKALKKFKEYLVTEVLELKNNNLTPVEKNLHFVWIGGQINDTAINYINQWKDVNSDYNVNVFYDSNAFLINTLKKTIVESAINDTLESFRENLNNPRFDYNKFFRKRMEIIYDKQKNFINYYKAQREENPELIIDDIVKIYLSNEYSKEIDELNTYIEESLNKIKQNSGNDVRNFEEFKNGESFKLYEQELVERWNLAAASDILRISALKEIGGMYLDVDMLPGIQPDLFESIEKPSSVTVDFWEMTKLEAIMKYKEYIPGYTSEHFDMLDEEVQSSFESALASKSDKSEIFSSLGDMEASPLEVKIAFNSKGIINQGLISVKDSYCSNLIVKQIENRYKILNNSLNPAISEDNDFNTTTNTFIDSIMAEANADNGRFMMELGKYLRVGFFPDVKTTVNLSGPEAYAAAYQDLLMFKEGSMNIHLIEADLRNFEISKTNISQSTEQEMASLWTFDDARAKVQFEEYKRNYFEGSLGEDDNLDFSQNIVVDKEYLLEKISSLARSSERGYIHYIVQLQGDKISYEAACNLFAKTPYDSILFQKNIENSEVAYYYNPGDGEIQEIDKYRIPSIISDRPKIKLTFIGHGKDEFNTDIFAGLDVDSLSTEIETAIDLAKEDISSKSIEINLLGCNMFSYSINVEETYPGKLLLKVKDKISELMPSISQDSIIVSANQYEVRINNEGRRELLDHSGEWINKEESIIKDISSKEYISFNPKENKITVKSKNLPELSTLLQEIRNNSNLSDIELEEKVMLAECEINVISNIDTQIVEERIEEAKNLTSDSINYIKNEFKLIESISDSLYDLKQQNELDDSHFISFEDISKTEDGFSIRFINKETGESIFVETEKEIFSEYANHIRREISNIKDTIFDTVNGKLVKKVNLDAIHEVNTLNAAFFIQSLIGYSSSKESLSNLSVAMKVQVYAQLFSTGLNTITDAAKVVELVSTALDETIDLLPTLSEGLPVIATIIDGVSLGAAIKELSETSDPLLRQEIEAKIGIMAVNLTAATTAIITSSLGIASGFSILLVPLAGISAGIPSLVNNELVLRDKATKVVDYFKHISLVETEGAFTLLDDKIMIPQDDLVISEIDFNNNSIVLGKCEIWRMEGGSGHTVTNDIDHFFSSPTITYIKPHLSIYDVLEVQKEELDLSKDLMVLPNAPNRVFAWETGWTPGLRSLENEGTKLLDRIRDHYKGEFYWRYFAFIADALITTLKPRYEDTNIRINLDSNNRSFIVPIITTEHIREKLSYSFHGSGGTYALSLSQYNMGINIELSESDVWIIDVDNVVRDVTIDSDKIKKGDLIEGILSTLSIEDNKIILNHHEINFSGDVNGSNGFISLTFSILEGINAIIEVDLLSKSYKLLISGELKILMLNSNHIQQKIDYIGFNSELQKNIPYSFVDSEGKENGFINGSTKEGLFVSELPDVVLISKVYMDDSKPSFGYYSNNLKDVKVITKDNVNILTGYYLKDDIKISLSFTLQDEKTIKLNGVHLDESGVAEILKFMNKKGSTNTSDSLMSFLESVNIKSIFVNFLQSKINFILDANFIISGTTSIGQFEFICDENDNIQPYFIKFNTLETTYTLYVGNRQNMIVEPNYDLDDSGDISSTVINFSQKYLYGIDSCVNKVVISPNIYTDEINITPVYETNNNYPEVIVLDANYINEKINVNINDLSIRYVWSNDGNDFILMSTSEENKVSQVKIRFVNVFKDKTLANKLSFNFSDKQDVPVSEIISAFTPSYYEDGLIGYDLGLVSLYNEKFYINNFGMMVSGLIYINDSLYYFKPPVNNLITGFVTVGDDKYYFNPTNGGAASIGETIINDKNYYFNQSGILQTGVFSTEDGLKYFAPANTLDENLEGEAIDFTGKLIIDENIYYFEDNYRGAVEWKELDGEMYYFSPETGKAFKGLNQIGDDKYYFNSDGIMQKGFVSINDKKYYFDDSGVMKVGYIEIDGKYFYFAENGEMQIGVFNTSDGFKYFAHHNEDLGNEEGEAISYSGILNFNNKIYYFDYSFTAVVGWKDLEDGSKYYFDEDTAEAYVGLSLINDGQYYFNDDGIMQVGFVTINNKVFYFSDSGIIESGVQNIDDNYFYIDEKGIVQIGVFDTSDEYKYFAPANTVNDNIYGQAVDYSGLVRVGEDIYYFGETYTIETGWIYDMENESDKYYFNPETKKACKGINLIDDIKYYFDENGIMRTGLISFENNDYYFNENGEMQFGYINIEDKMFYFGEDGVMQIGVFNTQDGFKYFAHQNTLDENFEGESINYTGWLDLDEKRYYFTDEYIAATGSVIIDGEEYYFDPDTAQLVISE

SEQ ID NO: 175 - protein, 2366 aa, Clostridium difficile; identical to SEQ ID NO: 174

SEQ ID NO: 176 - protein, 2366 aa, Clostridium difficile; identical to SEQ ID NO: 174

SEQ ID NO: 177 - protein, 2366 aa, Clostridium difficile; identical to SEQ ID NO: 174

SEQ ID NO: 178 - protein, 2710 aa, Clostridium difficile
MSLISKEELIKLAYSIRPRENEYKTILTNLDEYNKLTTNNNENKYLQLKKLNESIDVFMNKYKTSSRNRALSNLKKDILKEVILIKNSNTSPVEKNLHFVWIGGEVSDIALEYIKQWADINAEYNIKLWYDSEAFLVNTLKKAIVESSTTEALQLLEEEIQNPQFDNMKFYKKRMEFIYDRQKRFINYYKSQINKPTVPTIDDIIKSHLVSEYNRDETLLESYRTNSLRKINSNHGIDIRANSLFTEQELLNIYSQELLNRGNLAAASDIVRLLALKNFGGVYLDVDMLPGIHSDLFKTISRPSSIGLDRWEMIKLEAIMKYKKYINNYTSENFDKLDQQLKDNFKLIIESKSEKSEIFSKLENLNVSDLEIKIAFALGSVINQALISKQGSYLTNLVIEQVKNRYQFLNQHLNPAIESDNNFTDTTKIFHDSLFNSATAENSMFLTKIAPYLQVGFMPEARSTISLSGPGAYASAYYDFINLQENTIEKTLKASDLIEFKFPENNLSQLTEQEINSLWSFDQASAKYQFEKYVRDYTGGSLSEDNGVDFNKNTALDKNYLLNNKIPSNNVEEAGSKNYVHYIIQLQGDDISYEATCNLFSKNPKNSIIIQRNMNESAKSYFLSDDGESILELNKYRIPERLKNKEKVKVTFIGHGKDEFNTSEFARLSVDSLSNEISSFLDTIKLDISPKNVEVNLLGCNMFSYDFNVEETYPGKLLLSIMDKITSTLPDVNKNSITIGANQYEVRINSEGRKELLAHSGKWINKEEAIMSDLSSKEYIFFDSIDNKLKAKSKNIPGLASISEDIKTLLLDASVSPDTKFILNNLKLNIESSIGDYIYYEKLEPVKNIIHNSIDDLIDEFNLLENVSDELYELKKLNNLDEKYLISFEDISKNNSTYSVRFINKSNGESVYVETEKEIFSKYSEHITKEISTIKNSIITDVNGNLLDNIQLDHTSQVNTLNAAFFIQSLIDYSSNKDVLNDLSTSVKVQLYAQLFSTGLNTIYDSIQLVNLISNAVNDTINVLPTITEGIPIVSTILDGINLGAAIKELLDEHDPLLKKELEAKVGVLAINMSLSIAATVASIVGIGAEVTIFLLPIAGISAGIPSLVNNELILHDKATSVVNYFNHLSESKKYGPLKTEDDKILVPIDDLVISEIDFNNNSIKLGTCNILAMEGGSGHTVTGNIDHFFSSPSISSHIPSLSIYSAIGIETENLDFSKKIMMLPNAPSRVFWWETGAVPGLRSLENDGTRLLDSIRDLYPGKFYWRFYAFFDYAITTLKPVYEDTNIKIKLDKDTRNFIMPTITTNEIRNKLSYSFDGAGGTYSLLLSSYPISTNINLSKDDLWIFNIDNEVREISIENGTIKKGKLIKDVLSKIDINKNKLIIGNQTIDFSGDIDNKDRYIFLTCELDDKISLIIEINLVAKSYSLLLSGNKNYLISNLSNTIEKINTLGLDSKNIAYNYTDESNNKYFGAISKTSQKSIIHYKKDSKNILEFYNDSTLEFNSKDFIAEDINVFMKDDINTITGKYYVDNNTDKGIDFSISLVSKNQVKVNGLYLNESVYSSYLDFVKNSDGHHNTSNFMNLFLDNISFWKLFGFENINFVIDKYFTLVGKTNLGYVEFICDNNKNIDIYFGEWKTSSSKSTIFSGNGRNVVVEPIYNPDTGEDISTSLDFSYEPLYGIDRYINKVLIAPDLYTSLININTNYYSNEYYPEIIVLNPNTFHKKVNINLDSSSFEYKWSTEGSDFILVRYLEESNKKILQKIRIKGILSNTQSFNKMSIDFKDIKKLSLGYIMSNFKSFNSENELDRDHLGFKIIDNKTYYYDEDSKLVKGLININNSLFYFDPIEFNLVTGWQTINGKKYYFDINTGAALTSYKIINGKHFYFNNDGVMQLGVFKGPDGFEYFAPANTQNNNIEGQAIVYQSKFLTLNGKKYYFDNDSKAVTGWRIINNEKYYFNPNNAIAAVGLQVIDNNKYYFNPDTAIISKGWQTVNGSRYYFDTDTAIAFNGYKTIDGKHFYFDSDCVVKIGVFSTSNGFEYFAPANTYNNNIEGQAIVYQSKFLTLNGKKYYFDNNSKAVTGWQTIDSKKYYFNTNTAEAATGWQTIDGKKYYFNTNTAEAATGWQTIDGKKYYFNTNTAIASTGYTIINGKHFYFNTDGIMQIGVFKGPNGFEYFAPANTDANNIEGQAILYQNEFLTLNGKKYYFGSDSKAVTGWRIINNKKYYFNPNNAIAAIHLCTINNDKYYFSYDGILQNGYITIERNNFYFDANNESKMVTGVFKGPNGFEYFAPANTHNNNIEGQAIVYQNKFLTLNGKKYYFDNDSKAVTGWQTIDGKKYYFNLNTAEAATGWQTIDGKKYYFNLNTAEAATGWQTIDGKKYYFNTNTFIASTGYTSINGKHFYFNTDGIMQIGVFKGPNGFEYFAPANTHNNNIEGQAILYQNKFLTLNGKKYYFGSDSKAVTGLRTIDGKKYYFNTNTAVAVTGWQTINGKKYYFNTNTSIASTGYTIISGKHFYFNTDGIMQIGVFKGPDGFEYFAPANTDANNIEGQAIRYQNRFLYLHDNIYYFGNNSKAATGWVTIDGNRYYFEPNTAMGANGYKTIDNKNFYFRNGLPQIGVFKGSNGFEYFAPANTDANNIEGQAIRYQNRFLHLLGKIYYFGNNSKAVTGWQTINGKVYYFMPDTAMAAAGGLFEIDGVIYFFGVDGVKAPGIYG

SEQ ID NO: 179 - protein, 2366 aa, Clostridium difficile
MSLVNRKQLEKMANVRFRTQEDEYVAILDALEEYHNMSENTVVEKYLKLKDINSLTDIYIDTYKKSGRNKALKKFKEYLVTEVLELKNNNLTPVEKNLHFVWIGGQINDTAINYINQWKDVNSDYNVNVFYDSNAFLINTLKKTVVESAINDTLESFRENLNDPRFDYNKFFRKRMEIIYDKQKNFINYYKAQREENPELIIDDIVKTYLSNEYSKEIDELNTYIEESLNKITQNSGNDVRNFEEFKNGESFNLYEQELVERWNLAAASDILRISALKEIGGMYLDVDMLPGIQPDLFESIEKPSSVTVDFWEMTKLEAIMKYKEYIPEYTSEHFDMLDEEVQSSFESVLASKSDKSEIFSSLGDMEASPLEVKIAFNSKGIINQGLISVKDSYCSNLIVKQIENRYKILNNSLNPAISEDNDFNTTTNTFIDSIMAEANADNGRFMMELGKYLRVGFFPDVKTTINLSGPEAYAAAYQDLLMFKEGSMNIHLIEADLRNFEISKTNISQSTEQEMASLWSFDDARAKAQFEEYKRNYFEGSLGEDDNLDFSQNIVVDKEYLLEKISSLARSSERGYIHYIVQLQGDKISYEAACNLFAKTPYDSVLFQKNIEDSEIAYYYNPGDGEIQEIDKYKIPSIISDRPKIKLTFIGHGKDEFNTDIFAGFDVDSLSTEIEAAIDLAKEDISPKSIEINLLGCNMFSYSINVEETYPGKLLLKVKDKISELMPSISQDSIIVSANQYEVRINSEGRRELLDHSGEWINKEESIIKDISSKEYISFNPKENKITVKSKNLPELSTLLQEIRNNSNSSDIELEEKVMLTECEINVISNIDTQIVEERIEEAKNLTSDSINYIKDEFKLIESISDALCDLKQQNELEDSHFISFEDISETEEGFSIRFINKETGESIFVETEKTIFSEYANHITEEISKIKGTIFDTVNGKLVKKVNLDTTHEVNTLNAAFFIQSLIEYNSSKESLSNLSVAMKVQVYAQLFSTGLNTITDAAKVVELVSTALDETIDLLPTLSEGLPIIATIIDGVSLGAAIKELSETSDPLLRQEIEAKIGIMAVNLTTATTAIITSSLGIASGFSILLVPLAGISAGIPSLVNNELVLRDKATKVVDYFKHVSLVETEGVFTLLDDKIMMPQDDLVISEIDFNNNSIVLGKCEIWRMEGGSGHTVTDDIDHFFSAPSITYREPHLSIYDVLEVQKEELDLSKDLMVLPNAPNRVFAWETGWTPGLRSLENDGTKLLDRIRDNYEGEFYWRYFAFIADALITTLKPRYEDTNIRINLDSNTRSFIVPIITTEYIREKLSYSFYGSGGTYALSLSQYNMGINIELSESDVWIIDVDNVVRDVTIESDKIKKGDLIEGILSTLSIEENKIILNSHEINFSGEVNGSNGFVSLTFSILEGINAIIEVDLLSKSYKLLISGELKILMLNSNHIQQKIDYIGFNSELQKNIPYSFVDSEGKENGFINGSTKEGLFVSELPDVVLISKVYMDDSKPSFGYYSNNLKDVKVITKDNVNILTGYYLKDDIKISLSLTLQDEKTIKLNSVHLDESGVAEILKFMNRKGNTNTSDSLMSFLESMNIKSIFVNFLQSNIKFILDANFIISGTTSIGQFEFICDENDNIQPYFIKFNTLETNYTLYVGNRQNMIVEPNYDLDDSGDISSTVINFSQKYLYGIDSCVNKVVISPNIYTDEINITPVYETNNTYPEVIVLDANYINEKINVNINDLSIRYVWSNDGNDFILMSTSEENKVSQVKIRFVNVFKDKTLANKLSFNFSDKQDVPVSEIILSFTPSYYEDGLIGYDLGLVSLYNEKFYINNFGMMVSGLIYINDSLYYFKPPVNNLITGFVTVGDDKYYFNPINGGAASIGETIIDDKNYYFNQSGVLQTGVFSTEDGFKYFAPANTLDENLEGEAIDFTGKLIIDENIYYFEDNYRGAVEWKELDGEMHYFSPETGKAFKGLNQIGDDKYYFNSDGVMQKGFVSINDNKHYFDDSGVMKVGYTEIDGKYFYFAENGEMQIGVFNTEDGFKYFAHHNEDLGNEEGEEISYSGILNFNNKIYYFDDSFTAVVGWKDLEDGSKYYFDEDTAEAYIGLSLINDGQYYFNDDGIMQVGFVTINDKVFYFSDSGIIESGVQNIDDNYFYIDDNGIVQIGVFDTSDGYKYFAPANTVNDNIYGQAVEYSGLVRVGEDVYYFGETYTIETGWIYDMENESDKYYFNPETKKACKGINLIDDIKYYFDEKGIMRTGLISFENNNYYFNENGEMQFGYINIEDKMFYFGEDGVMQIGVFNTPDGFKYFAHQNTLDENFEGESINYTGWLDLDEKRYYFTDEYIAATGSVIIDGEEYYFDPDTAQLVISE

SEQ ID NO: 180 - protein, 2710 aa, Clostridium difficile; identical to SEQ ID NO: 95

SEQ ID NO: 181 - protein, 2366 aa, Clostridium difficile; identical to SEQ ID NO: 116

SEQ ID NO: 182 - protein, 2367 aa, Clostridium difficile; identical to SEQ ID NO: 121

SEQ ID NO: 183 - protein, 2709 aa, synthetic construct
  REGION 1..2709: note = Synthetic amino acid sequence
SLISKEELIKLAYSIRPRENEYKTILTNLDEYNKLTTNNNENKYLQLKKLNESIDVFMNKYKTSSRNRALSNLKKDILKEVILIKNSNTSPVEKNLHFVWIGGEVSDIALEYIKQWADINAEYNIKLWYDSEAFLVNTLKKAIVESSTTEALQLLEEEIQNPQFDNMKFYKKRMEFIYDRQKRFINYYKSQINKPTVPTIDDIIKSHLVSEYNRDETVLESYRTNSLRKINSNHGIDIRANSLFTEQELLNIYSQELLNRGNLAAASDIVRLLALKNFGGVYLAVAMLPGIHSDLFKTISRPSSIGLDRWEMIKLEAIMKYKKYINNYTSENFDKLDQQLKDNFKLIIESKSEKSEIFSKLENLNVSDLEIKIAFALGSVINQALISKQGSYLTNLVIEQVKNRYQFLNQHLNPAIESDNNFTDTTKIFHDSLFNSATAENSMFLTKIAPYLQVGFMPEARSTISLSGPGAYASAYYDFINLQENTIEKTLKASDLIEFKFPENNLSQLTEQEINSLWSFDQASAKYQFEKYVRDYTGGSLSEDNGVDFNKNTALDKNYLLNNKIPSNNVEEAGSKNYVHYIIQLQGDDISYEATCNLFSKNPKNSIIIQRNMNESAKSYFLSDDGESILELNKYRIPERLKNKEKVKVTFIGHGKDEFNTSEFARLSVDSLSNEISSFLDTIKLDISPKNVEVNLLGANMFSYDFNVEETYPGKLLLSIMDKITSTLPDVNKNSITIGANQYEVRINSEGRKELLAHSGKWINKEEAIMSDLSSKEYIFFDSIDNKLKAKSKNIPGLASISEDIKTLLLDASVSPDTKFILNNLKLNIESSIGDYIYYEKLEPVKNIIHNSIDDLIDEFNLLENVSDELYELKKLNNLDEKYLISFEDISKNNSTYSVRFINKSNGESVYVETEKEIFSKYSEHITKEISTIKNSIITDVNGNLLDNIQLDHTSQVNTLNAAFFIQSLIKYSSNKKVLNDLSTSVKVQLYAQLFSTGLNTIYDSIQLVNLISNAVNDTINVLPTITEGIPIVSTILDGINLGAAIKELLDEHDPLLKKELEAKVGVLAINMSLSIAATVASIVGIGAEVTIFLLPIAGISAGIPSLVNNELILHDKATSVVNYFNHLSESKKYGPLKTEDDKILVPIDDLVISEIDFNNNSIKLGTCNILAMEGGSGHTVTGNIDHFFSSPSISSHIPSLSIYSAIGIETENLDFSKKIMMLPNAPSRVFWWETGAVPGLRSLENDGTRLLDSIRDLYPGKFYWRFYAFFDYAITTLKPVYEDTNIKIKLDKDTRNFIMPTITTNEIRNKLSYSFDGAGGTYSLLLSSYPISTNINLSKDDLWIFNIDNEVREISIENGTIKKGKLIKDVLSKIDINKNKLIIGNQTIDFSGDIDNKDRYIFLTCELDDKISLIIEINLVAKSYSLLLSGDKNYLISNLSNIIEKINTLGLDSKNIAYNYTDESNNKYFGAISKTSQKSIIHYKKDSKNILEFYNDSTLEFNSKDFIAEDINVFMKDDINTITGKYYVDNNTDKSIDFSISLVSKNQVKVNGLYLNESVYSSYLDFVKNSDGHHNTSNFMNLFLDNISFWKLFGFENINFVIDKYFTLVGKTNLGYVEFICDNNKNIDIYFGEWKTSSSKSTIFSGNGRNVVVEPIYNPDTGEDISTSLDFSYEPLYGIDRYINKVLIAPDLYTSLININTNYYSNEYYPEIIVLNPNTFHKKVNINLDSSSFEYKWSTEGSDFILVRYLEESNKKILQKIRIKGILSNTQSFNKMSIDFKDIKKLSLGYIMSNFKSFNSENELDRDHLGFKIIDNKTYYYDEDSKLVKGLININNSLFYFDPIEFNLVTGWQTINGKKYYFDINTGAALISYKIINGKHFYFNNDGVMQLGVFKGPDGFEYFAPANTQNNNIEGQAIVYQSKFLTLNGKKYYFDNDSKAVTGWRIINNEKYYFNPNNAIAAVGLQVIDNNKYYFNPDTAIISKGWQTVNGSRYYFDTDTAIAFNGYKTIDGKHFYFDSDCVVKIGVFSTSNGFEYFAPANTYNNNIEGQAIVYQSKFLTLNGKKYYFDNNSKAVTGWQTIDSKKYYFNTNTAEAATGWQTIDGKKYYFNTNTAEAATGWQTIDGKKYYFNTNTAIASTGYTIINGKHFYFNTDGIMQIGVFKGPNGFEYFAPANTDANNIEGQAILYQNEFLTLNGKKYYFGSDSKAVTGWRIINNKKYYFNPNNAIAAIHLCTINNDKYYFSYDGILQNGYITIERNNFYFDANNESKMVTGVFKGPNGFEYFAPANTHNNNIEGQAIVYQNKFLTLNGKKYYFDNDSKAVTGWQTIDGKKYYFNLNTAEAATGWQTIDGKKYYFNLNTAEAATGWQTIDGKKYYFNTNTFIASTGYTSINGKHFYFNTDGIMQIGVFKGPNGFEYFAPANTHNNNIEGQAILYQNKFLTLNGKKYYFGSDSKAVTGLRTIDGKKYYFNTNTAVAVTGWQTINGKKYYFNTNTSIASTGYTIISGKHFYFNTDGIMQIGVFKGPDGFEYFAPANTDANNIEGQAIRYQNRFLYLHDNIYYFGNNSKAATGWVTIDGNRYYFEPNTAMGANGYKTIDNKNFYFRNGLPQIGVFKGSNGFEYFAPANTDANNIEGQAIRYQNRFLHLLGKIYYFGNNSKAVTGWQTINGKVYYFMPDTAMAAAGGLFEIDGVIYFFGVDGVKAPGIYG

SEQ ID NO: 184 - protein, 2365 aa, synthetic construct
  REGION 1..2365: note = Synthetic amino acid sequence
SLVNRKQLEKMANVRFRTQEDEYVAILDALEEYHNMSENTVVEKYLKLKDINSLTDIYIDTYKKSGRNKALKKFKEYLVTEVLELKNNNLTPVEKNLHFVWIGGQINDTAINYINQWKDVNSDYNVNVFYDSNAFLINTLKKTVVESAINDTLESFRENLNDPRFDYNKFFRKRMEIIYDKQKNFINYYKAQREENPELIIDDIVKTYLSNEYSKEIDELNTYIEESLNKITQNSGNDVRNFEEFKNGESFNLYEQELVERWNLAAASDILRISALKEIGGMYLAVAMLPGIQPDLFESIEKPSSVTVDFWEMTKLEAIMKYKEYIPEYTSEHFDMLDEEVQSSFESVLASKSDKSEIFSSLGDMEASPLEVKIAFNSKGIINQGLISVKDSYCSNLIVKQIENRYKILNNSLNPAISEDNDFNTTTNTFIDSIMAEANADNGRFMMELGKYLRVGFFPDVKTTINLSGPEAYAAAYQDLLMFKEGSMNIHLIEADLRNFEISKTNISQSTEQEMASLWSFDDARAKAQFEEYKRNYFEGSLGEDDNLDFSQNIVVDKEYLLEKISSLARSSERGYIHYIVQLQGDKISYEAACNLFAKTPYDSVLFQKNIEDSEIAYYYNPGDGEIQEIDKYKIPSIISDRPKIKLTFIGHGKDEFNTDIFAGFDVDSLSTEIEAAIDLAKEDISPKSIEINLLGANMFSYSINVEETYPGKLLLKVKDKISELMPSISQDSIIVSANQYEVRINSEGRRELLDHSGEWINKEESIIKDISSKEYISFNPKENKITVKSKNLPELSTLLQEIRNNSNSSDIELEEKVMLTECEINVISNIDTQIVEERIEEAKNLTSDSINYIKDEFKLIESISDALCDLKQQNELEDSHFISFEDISETDEGFSIRFINKETGESIFVETEKTIFSEYANHITEEISKIKGTIFDTVNGKLVKKVNLDTTHEVNTLNAAFFIQSLIKYNSSKKSLSNLSVAMKVQVYAQLFSTGLNTITDAAKVVELVSTALDETIDLLPTLSEGLPIIATIIDGVSLGAAIKELSETSDPLLRQEIEAKIGIMAVNLTTATTAIITSSLGIASGFSILLVPLAGISAGIPSLVNNELVLRDKATKVVDYFKHVSLVETEGVFTLLDDKIMMPQDDLVISEIDFNNNSIVLGKCEIWRMEGGSGHTVTDDIDHFFSAPSITYREPHLSIYDVLEVQKEELDLSKDLMVLPNAPNRVFAWETGWTPGLRSLENDGTKLLDRIRDNYEGEFYWRYFAFIADALITTLKPRYEDTNIRINLDSNTRSFIVPIITTEYIREKLSYSFYGSGGTYALSLSQYNMGINIELSESDVWIIDVDNVVRDVTIESDKIKKGDLIEGILSTLSIEENKIILNSHEINFSGEVNGSNGFVSLTFSILEGINAIIEVDLLSKSYKLLISGELKILMLNSNHIQQKIDYIGFNSELQKNIPYSFVDSEGKENGFINGSTKEGLFVSELPDVVLISKVYMDDSKPSFGYYSNNLKDVKVITKDNVNILTGYYLKDDIKISLSLTLQDEKTIKLNSVHLDESGVAEILKFMNRKGNTNTSDSLMSFLESMNIKSIFVNFLQSNIKFILDANFIISGTTSIGQFEFICDENDNIQPYFIKFNTLETNYTLYVGNRQNMIVEPNYDLDDSGDISSTVINFSQKYLYGIDSCVNKVVISPNIYTDEINITPVYETNNTYPEVIVLDANYINEKINVNINDLSIRYVWSNDGNDFILMSTSEENKVSQVKIRFVNVFKDKTLANKLSFNFSDKQDVPVSEIILSFTPSYYEDGLIGYDLGLVSLYNEKFYINNFGMMVSGLIYINDSLYYFKPPVNNLITGFVTVGDDKYYFNPINGGAASIGETIIDDKNYYFNQSGVLQTGVFSTEDGFKYFAPANTLDENLEGEAIDFTGKLIIDENIYYFDDNYRGAVEWKELDGEMHYFSPETGKAFKGLNQIGDYKYYFNSDGVMQKGFVSINDNKHYFDDSGVMKVGYTEIDGKHFYFAENGEMQIGVFNTEDGFKYFAHHNEDLGNEEGEEISYSGILNFNNKIYYFDDSFTAVVGWKDLEDGSKYYFDEDTAEAYIGLSLINDGQYYFNDDGIMQVGFVTINDKVFYFSDSGIIESGVQNIDDNYFYIDDNGIVQIGVFDTSDGYKYFAPANTVNDNIYGQAVEYSGLVRVGEDVYYFGETYTIETGWIYDMENESDKYYFNPETKKACKGINLIDDIKYYFDEKGIMRTGLISFENNNYYFNENGEMQFGYINIEDKMFYFGEDGVMQIGVFNTPDGFKYFAHQNTLDENFEGESINYTGWLDLDEKRYYFTDEYIAATGSVIIDGEEYYFDPDTAQLVISE

SEQ ID NO: 185 - protein, 320 aa, Clostridium difficile
ASTGYTSINGKHFYFNTDGIMQIGVFKGPNGFEYFAPANTDANNIEGQAILYQNKFLTLNGKKYYFGSDSKAVTGLRTIDGKKYYFNTNTAVAVTGWQTINGKKYYFNTNTSIASTGYTIISGKHFYFNTDGIMQIGVFKGPDGFEYFAPANTDANNIEGQAIRYQNRFLYLHDNIYYFGNNSKAATGWVTIDGNRYYFEPNTAMGANGYKTIDNKNFYFRNGLPQIGVFKGSNGFEYFAPANTDANNIEGQAIRYQNRFLHLLGKIYYFGNNSKAVTGWQTINGKVYYFMPDTAMAAAGGLFEIDGVIYFFGVDGVKAP

SEQ ID NO: 186 - protein, 611 aa, Clostridium difficile
ILMSTSEENKVSQVKIRFVNVFKDKTLANKLSFNFSDKQDVPVSEIILSFTPSYYEDGLIGYDLGLVSLYNEKFYINNFGMMVSGLIYINDSLYYFKPPVNNLITGFVTVGDDKYYFNPINGGAASIGETIIDDKNYYFNQSGVLQTGVFSTEDGFKYFAPANTLDENLEGEAIDFTGKLIIDENIYYFDDNYRGAVEWKELDGEMHYFSPETGKAFKGLNQIGDYKYYFNSDGVMQKGFVSINDNKHYFDDSGVMKVGYTEIDGKHFYFAENGEMQIGVFNTEDGFKYFAHHNEDLGNEEGEEISYSGILNFNNKIYYFDDSFTAVVGWKDLEDGSKYYFDEDTAEAYIGLSLINDGQYYFNDDGIMQVGFVTINDKVFYFSDSGIIESGVQNIDDNYFYIDDNGIVQIGVFDTSDGYKYFAPANTVNDNIYGQAVEYSGLVRVGEDVYYFGETYTIETGWIYDMENESDKYYFNPETKKACKGINLIDDIKYYFDEKGIMRTGLISFENNNYYFNENGEMQFGYINIEDKMFYFGEDGVMQIGVFNTPDGFKYFAHQNTLDENFEGESINYTGWLDLDEKRYYFTDEYIAATGSVIIDGEEYYFDPDTA

SEQ ID NO: 187 - protein, 965 aa, Clostridium difficile
GWQTIDGKKYYFNTNTAIASTGYTIINGKHFYFNTDGIMQIGVFKGPNGFEYFAPANTDANNIEGQAILYQNEFLTLNGKKYYFGSDSKAVTGWRIINNKKYYFNPNNAIAAIHLCTINNDKYYFSYDGILQNGYITIERNNFYFDANNESKMVTGVFKGPNGFEYFAPANTHNNNIEGQAIVYQNKFLTLNGKKYYFDNDSKAVTGWQTIDGKKYYFNLNTAEAATGWQTIDGKKYYFNLNTAEAATGWQTIDGKKYYFNTNTFIASTGYTSINGKHFYFNTDGIMQIGVFKGPNGFEYFAPANTDANNIEGQAILYQNKFLTLNGKKYYFGSDSKAVTGLRTIDGKKYYFNTNTAVAVTGWQTINGKKYYFNTNTSIASTGYTIISGKHFYFNTDGIMQIGVFKGPDGFEYFAPANTDANNIEGQAIRYQNRFLYLHDNIYYFGNNSKAATGWVTIDGNRYYFEPNTAMGANGYKTIDNKNFYFRNGLPQIGVFKGSNGFEYFAPANTDANNIEGQAIRYQNRFLHLLGKIYYFGNNSKAVTGWQTINGKVYYFMPDTAMAAAGGLFEIDGVIYFFGVDGVKAPGFVSINDNKHYFDDSGVMKVGYTEIDGKHFYFAENGEMQIGVFNTEDGFKYFAHHNEDLGNEEGEEISYSGILNFNNKIYYFDDSFTAVVGWKDLEDGSKYYFDEDTAEAYIGLSLINDGQYYFNDDGIMQVGFVTINDKVFYFSDSGIIESGVQNIDDNYFYIDDNGIVQIGVFDTSDGYKYFAPANTVNDNIYGQAVEYSGLVRVGEDVYYFGETYTIETGWIYDMENESDKYYFNPETKKACKGINLIDDIKYYFDEKGIMRTGLISFENNNYYFNENGEMQFGYINIEDKMFYFGEDGVMQIGVFNTPDGFKYFAHQNTLDENFEGESINYTGWLDLDEKRYYFTDEYIAATGSVIIDGEEYYFDPDTAQLVISE

SEQ ID NO: 188 - protein, 965 aa, Clostridium difficile
GWQTIDGKKYYFNTNTAIASTGYTIINGKHFYFNTDGIMQIGVFKGPNGFEYFAPANTDANNIEGQAILYQNEFLTLNGKKYYFGSDSKAVTGWRIINNKKYYFNPNNAIAAIHLCTINNDKYYFSYDGILQNGYITIERNNFYFDANNESKMVTGVFKGPNGFEYFAPANTHNNNIEGQAIVYQNKFLTLNGKKYYFDNDSKAVTGWQTIDGKKYYFNLNTAEAATGWQTIDGKKYYFNLNTAEAATGWQTIDGKKYYFNTNTFIASTGYTSINGKHFYFNTDGIMQIGVFKGPNGFEYFAPANTDANNIEGQAILYQNKFLTLNGKKYYFGSDSKAVTGLRTIDGKKYYFNTNTAVAVTGWQTINGKKYYFNTNTSIASTGYTIISGKHFYFNTDGIMQIGVFKGPDGFEYFAPANTDANNIEGQAIRYQNRFLYLHDNIYYFGNNSKAATGWVTIDGNRYYFEPNTAMGANGYKTIDNKNFYFRNGLPQIGVFKGSNGFEYFAPANTDANNIEGQAIRYQNRFLHLLGKIYYFGNNSKAVTGWQTINGKVYYFMPDTAMAAAGGLNQIGDYKYYFNSDGVMQKGFVSINDNKHYFDDSGVMKVGYTEIDGKHFYFAENGEMQIGVFNTEDGFKYFAHHNEDLGNEEGEEISYSGILNFNNKIYYFDDSFTAVVGWKDLEDGSKYYFDEDTAEAYIGLSLINDGQYYFNDDGIMQVGFVTINDKVFYFSDSGIIESGVQNIDDNYFYIDDNGIVQIGVFDTSDGYKYFAPANTVNDNIYGQAVEYSGLVRVGEDVYYFGETYTIETGWIYDMENESDKYYFNPETKKACKGINLIDDIKYYFDEKGIMRTGLISFENNNYYFNENGEMQFGYINIEDKMFYFGEDGVMQIGVFNTPDGFKYFAHQNTLDENFEGESINYTGWLDLDEKRYYFTDEYIAATGSVIIDGEEYYFDPDTAQLVISE

SEQ ID NO: 189 - protein, 832 aa, Clostridium difficile
GWQTIDGKKYYFNTNTAIASTGYTIINGKHFYFNTDGIMQIGVFKGPNGFEYFAPANTDANNIEGQAILYQNEFLTLNGKKYYFGSDSKAVTGWRIINNKKYYFNPNNAIAAIHLCTINNDKYYFSYDGILQNGYITIERNNFYFDANNESKMVTGVFKGPNGFEYFAPANTHNNNIEGQAIVYQNKFLTLNGKKYYFDNDSKAVTGWQTIDGKKYYFNLNTAEAATGWQTIDGKKYYFNLNTAEAATGWQTIDGKKYYFNTNTFIASTGYTSINGKHFYFNTDGIMQIGVFKGPNGFEYFAPANTDANNIEGQAILYQNKFLTLNGKKYYFGSDSKAVTGLRTIDGKKYYFNTNTAVAVTGWQTINGKKYYFNTNTSIASTGYTIISGKHFYFNTDGIMQIGVFKGPDGFEYFAPANTDANNIEGQAIRYQNRFLYLHDNIYYFGNNSKAATGWVTIDGNRYYFEPNTAMGANGYKTIDNKNFYFRNGLPQIGVFKGSNGFEYFAHHNEDLGNEEGEEISYSGILNFNNKIYYFDDSFTAVVGWKDLEDGSKYYFDEDTAEAYIGLSLINDGQYYFNDDGIMQVGFVTINDKVFYFSDSGIIESGVQNIDDNYFYIDDNGIVQIGVFDTSDGYKYFAPANTVNDNIYGQAVEYSGLVRVGEDVYYFGETYTIETGWIYDMENESDKYYFNPETKKACKGINLIDDIKYYFDEKGIMRTGLISFENNNYYFNENGEMQFGYINIEDKMFYFGEDGVMQIGVFNTPDGFKYFAHQNTLDENFEGESINYTGWLDLDEKRYYFTDEYIAATGSVIIDGEEYYFDPDTAQLVISE

SEQ ID NO: 190 - protein, 1056 aa, Clostridium difficile
GWQTIDGKKYYFNTNTAIASTGYTIINGKHFYFNTDGIMQIGVFKGPNGFEYFAPANTDANNIEGQAILYQNEFLTLNGKKYYFGSDSKAVTGWRIINNKKYYFNPNNAIAAIHLCTINNDKYYFSYDGILQNGYITIERNNFYFDANNESKMVTGVFKGPNGFEYFAPANTHNNNIEGQAIVYQNKFLTLNGKKYYFDNDSKAVTGWQTIDGKKYYFNLNTAEAATGWQTIDGKKYYFNLNTAEAATGWQTIDGKKYYFNTNTFIASTGYTSINGKHFYFNTDGIMQIGVFKGPNGFEYFAPANTDANNIEGQAILYQNKFLTLNGKKYYFGSDSKAVTGLRTIDGKKYYFNTNTAVAVTGWQTINGKKYYFNTNTSIASTGYTIISGKHFYFNTDGIMQIGVFKGPDGFEYFAPANTDANNIEGQAIRYQNRFLYLHDNIYYFGNNSKAATGWVTIDGNRYYFEPNTAMGANGYKTIDNKNFYFRNGLPQIGVFKGSNGFEYFAPANTDANNIEGQAIRYQNRFLHLLGKIYYFGNNSKAVTGWQTINGKVYYFMPDTAMAAAGGETIIDDKNYYFNQSGVLQTGVFSTEDGFKYFAPANTLDENLEGEAIDFTGKLIIDENIYYFDDNYRGAVEWKELDGEMHYFSPETGKAFKGLNQIGDYKYYFNSDGVMQKGFVSINDNKHYFDDSGVMKVGYTEIDGKHFYFAENGEMQIGVFNTEDGFKYFAHHNEDLGNEEGEEISYSGILNFNNKIYYFDDSFTAVVGWKDLEDGSKYYFDEDTAEAYIGLSLINDGQYYFNDDGIMQVGFVTINDKVFYFSDSGIIESGVQNIDDNYFYIDDNGIVQIGVFDTSDGYKYFAPANTVNDNIYGQAVEYSGLVRVGEDVYYFGETYTIETGWIYDMENESDKYYFNPETKKACKGINLIDDIKYYFDEKGIMRTGLISFENNNYYFNENGEMQFGYINIEDKMFYFGEDGVMQIGVFNTPDGFKYFAHQNTLDENFEGESINYTGWLDLDEKRYYFTDEYIAATGSVIIDGEEYYFDPDTAQLVISE

SEQ ID NO: 191 - protein, 970 aa, Clostridium difficile
GWQTIDGKKYYFNTNTAIASTGYTIINGKHFYFNTDGIMQIGVFKGPNGFEYFAPANTDANNIEGQAILYQNEFLTLNGKKYYFGSDSKAVTGWRIINNKKYYFNPNNAIAAIHLCTINNDKYYFSYDGILQNGYITIERNNFYFDANNESKMVTGVFKGPNGFEYFAPANTHNNNIEGQAIVYQNKFLTLNGKKYYFDNDSKAVTGWQTIDGKKYYFNLNTAEAATGWQTIDGKKYYFNLNTAEAATGWQTIDGKKYYFNTNTFIASTGYTSINGKHFYFNTDGIMQIGVFKGPNGFEYFAPANTDANNIEGQAILYQNKFLTLNGKKYYFGSDSKAVTGLRTIDGKKYYFNTNTAVAVTGWQTINGKKYYFNTNTSIASTGYTIISGKHFYFNTDGIMQIGVFKGPDGFEYFAPANTDANNIEGQAIRYQNRFLYLHDNIYYFGNNSKAATGWVTIDGNRYYFEPNTAMGANGYKTIDNKNFYFRNGLPQIGVFKGSNGFEYFAPANTDANNIEGQAIRYQNRFLHLLGKIYYFGNNSKAVTGWQTINGKVYYFMPDTAMAAAGGLFEIDGVIYFFGVDGVKAPGIYGGGFVSINDNKHYFDDSGVMKVGYTEIDGKHFYFAENGEMQIGVFNTEDGFKYFAHHNEDLGNEEGEEISYSGILNFNNKIYYFDDSFTAVVGWKDLEDGSKYYFDEDTAEAYIGLSLINDGQYYFNDDGIMQVGFVTINDKVFYFSDSGIIESGVQNIDDNYFYIDDNGIVQIGVFDTSDGYKYFAPANTVNDNIYGQAVEYSGLVRVGEDVYYFGETYTIETGWIYDMENESDKYYFNPETKKACKGINLIDDIKYYFDEKGIMRTGLISFENNNYYFNENGEMQFGYINIEDKMFYFGEDGVMQIGVFNTPDGFKYFAHQNTLDENFEGESINYTGWLDLDEKRYYFTDEYIAATGSVIIDGEEYYFDPDTAQLVISE

SEQ ID NO: 192 - protein, 1112 aa, Clostridium difficile
ATGWQTIDGKKYYFNTNTAIASTGYTIINGKHFYFNTDGIMQIGVFKGPNGFEYFAPANTDANNIEGQAILYQNEFLTLNGKKYYFGSDSKAVTGWRIINNKKYYFNPNNAIAAIHLCTINNDKYYFSYDGILQNGYITIERNNFYFDANNESKMVTGVFKGPNGFEYFAPANTHNNNIEGQAIVYQNKFLTLNGKKYYFDNDSKAVTGWQTIDGKKYYFNLNTAEAATGWQTIDGKKYYFNLNTAEAATGWQTIDGKKYYFNTNTFIASTGYTSINGKHFYFNTDGIMQIGVFKGPNGFEYFAPANTDANNIEGQAILYQNKFLTLNGKKYYFGSDSKAVTGLRTIDGKKYYFNTNTAVAVTGWQTINGKKYYFNTNTSIASTGYTIISGKHFYFNTDGIMQIGVFKGPDGFEYFAPANTDANNIEGQAIRYQNRFLYLHDNIYYFGNNSKAATGWVTIDGNRYYFEPNTAMGANGYKTIDNKNFYFRNGLPQIGVFKGSNGFEYFAPANTDANNIEGQAIRYQNRFLHLLGKIYYFGNNSKAVTGWQTINGKVYYFMPDTAMAAAGGLFEIDGVIYFFGVDGVKAPGIYGGTGFVTVGDDKYYFNPINGGAASIGETIIDDKNYYFNQSGVLQTGVFSTEDGFKYFAPANTLDENLEGEAIDFTGKLIIDENIYYFDDNYRGAVEWKELDGEMHYFSPETGKAFKGLNQIGDYKYYFNSDGVMQKGFVSINDNKHYFDDSGVMKVGYTEIDGKHFYFAENGEMQIGVFNTEDGFKYFAHHNEDLGNEEGEEISYSGILNFNNKIYYFDDSFTAVVGWKDLEDGSKYYFDEDTAEAYIGLSLINDGQYYFNDDGIMQVGFVTINDKVFYFSDSGIIESGVQNIDDNYFYIDDNGIVQIGVFDTSDGYKYFAPANTVNDNIYGQAVEYSGLVRVGEDVYYFGETYTIETGWIYDMENESDKYYFNPETKKACKGINLIDDIKYYFDEKGIMRTGLISFENNNYYFNENGEMQFGYINIEDKMFYFGEDGVMQIGVFNTPDGFKYFAHQNTLDENFEGESINYTGWLDLDEKRYYFTDEYIAATGSVIIDGEEYYFDPDTAQLVISEHHHHHH

SEQ ID NO: 193 - protein, 1107 aa, Clostridium difficile
ATGWQTIDGKKYYFNTNTAIASTGYTIINGKHFYFNTDGIMQIGVFKGPNGFEYFAPANTDANNIEGQAILYQNEFLTLNGKKYYFGSDSKAVTGWRIINNKKYYFNPNNAIAAIHLCTINNDKYYFSYDGILQNGYITIERNNFYFDANNESKMVTGVFKGPNGFEYFAPANTHNNNIEGQAIVYQNKFLTLNGKKYYFDNDSKAVTGWQTIDGKKYYFNLNTAEAATGWQTIDGKKYYFNLNTAEAATGWQTIDGKKYYFNTNTFIASTGYTSINGKHFYFNTDGIMQIGVFKGPNGFEYFAPANTDANNIEGQAILYQNKFLTLNGKKYYFGSDSKAVTGLRTIDGKKYYFNTNTAVAVTGWQTINGKKYYFNTNTSIASTGYTIISGKHFYFNTDGIMQIGVFKGPDGFEYFAPANTDANNIEGQAIRYQNRFLYLHDNIYYFGNNSKAATGWVTIDGNRYYFEPNTAMGANGYKTIDNKNFYFRNGLPQIGVFKGSNGFEYFAPANTDANNIEGQAIRYQNRFLHLLGKIYYFGNNSKAVTGWQTINGKVYYFMPDTAMAAAGGLFEIDGVIYFFGVDGVKAVTGFVTVGDDKYYFNPINGGAASIGETIIDDKNYYFNQSGVLQTGVFSTEDGFKYFAPANTLDENLEGEAIDFTGKLIIDENIYYFDDNYRGAVEWKELDGEMHYFSPETGKAFKGLNQIGDYKYYFNSDGVMQKGFVSINDNKHYFDDSGVMKVGYTEIDGKHFYFAENGEMQIGVFNTEDGFKYFAHHNEDLGNEEGEEISYSGILNFNNKIYYFDDSFTAVVGWKDLEDGSKYYFDEDTAEAYIGLSLINDGQYYFNDDGIMQVGFVTINDKVFYFSDSGIIESGVQNIDDNYFYIDDNGIVQIGVFDTSDGYKYFAPANTVNDNIYGQAVEYSGLVRVGEDVYYFGETYTIETGWIYDMENESDKYYFNPETKKACKGINLIDDIKYYFDEKGIMRTGLISFENNNYYFNENGEMQFGYINIEDKMFYFGEDGVMQIGVFNTPDGFKYFAHQNTLDENFEGESINYTGWLDLDEKRYYFTDEYIAATGSVIIDGEEYYFDPDTAQLVISEHHHHHH

SEQ ID NO: 194 - protein, 1128 aa, Clostridium difficile
ATGWQTIDGKKYYFNTNTAIASTGYTIINGKHFYFNTDGIMQIGVFKGPNGFEYFAPANTDANNIEGQAILYQNEFLTLNGKKYYFGSDSKAVTGWRIINNKKYYFNPNNAIAAIHLCTINNDKYYFSYDGILQNGYITIERNNFYFDANNESKMVTGVFKGPNGFEYFAPANTHNNNIEGQAIVYQNKFLTLNGKKYYFDNDSKAVTGWQTIDGKKYYFNLNTAEAATGWQTIDGKKYYFNLNTAEAATGWQTIDGKKYYFNTNTFIASTGYTSINGKHFYFNTDGIMQIGVFKGPNGFEYFAPANTDANNIEGQAILYQNKFLTLNGKKYYFGSDSKAVTGLRTIDGKKYYFNTNTAVAVTGWQTINGKKYYFNTNTSIASTGYTIISGKHFYFNTDGIMQIGVFKGPDGFEYFAPANTDANNIEGQAIRYQNRFLYLHDNIYYFGNNSKAATGWVTIDGNRYYFEPNTAMGANGYKTIDNKNFYFRNGLPQIGVFKGSNGFEYFAPANTDANNIEGQAIRYQNRFLHLLGKIYYFGNNSKAVTGWQTINGKVYYFMPDTAMAAAGGLFEIDGVIYFFGVDGVKAVSGLIYINDSLYYFKPPVNNLITGFVTVGDDKYYFNPINGGAASIGETIIDDKNYYFNQSGVLQTGVFSTEDGFKYFAPANTLDENLEGEAIDFTGKLIIDENIYYFDDNYRGAVEWKELDGEMHYFSPETGKAFKGLNQIGDYKYYFNSDGVMQKGFVSINDNKHYFDDSGVMKVGYTEIDGKHFYFAENGEMQIGVFNTEDGFKYFAHHNEDLGNEEGEEISYSGILNFNNKIYYFDDSFTAVVGWKDLEDGSKYYFDEDTAEAYIGLSLINDGQYYFNDDGIMQVGFVTINDKVFYFSDSGIIESGVQNIDDNYFYIDDNGIVQIGVFDTSDGYKYFAPANTVNDNIYGQAVEYSGLVRVGEDVYYFGETYTIETGWIYDMENESDKYYFNPETKKACKGINLIDDIKYYFDEKGIMRTGLISFENNNYYFNENGEMQFGYINIEDKMFYFGEDGVMQIGVFNTPDGFKYFAHQNTLDENFEGESINYTGWLDLDEKRYYFTDEYIAATGSVIIDGEEYYFDPDTAQLVISEHHHHHH

SEQ ID NO: 195 - protein, 994 aa, Clostridium difficile
ATGWQTIDGKKYYFNTNTAIASTGYTIINGKHFYFNTDGIMQIGVFKGPNGFEYFAPANTDANNIEGQAILYQNEFLTLNGKKYYFGSDSKAVTGWRIINNKKYYFNPNNAIAAIHLCTINNDKYYFSYDGILQNGYITIERNNFYFDANNESKMVTGVFKGPNGFEYFAPANTHNNNIEGQAIVYQNKFLTLNGKKYYFDNDSKAVTGWQTIDGKKYYFNLNTAEAATGWQTIDGKKYYFNLNTAEAATGWQTIDGKKYYFNTNTFIASTGYTSINGKHFYFNTDGIMQIGVFKGPNGFEYFAPANTDANNIEGQAILYQNKFLTLNGKKYYFGSDSKAVTGLRTIDGKKYYFNTNTAVAVTGWQTINGKKYYFNTNTSIASTGYTIISGKHFYFNTDGIMQIGVFKGPDGFEYFAPANTDANNIEGQAIRYQNRFLYLHDNIYYFGNNSKAATGWVTIDGNRYYFEPNTAMGANGYKTIDNKNFYFRNGLPQIGVFKGSNGFEYFAPANTDANNIEGQAIRYQNRFLHLLGKIYYFGNNSKAVTGWQTINGKVYYFMPDTAMAAAGGLFEIDGVIYFFGVDGVKAVKGLNQIGDYKYYFNSDGVMQKGFVSINDNKHYFDDSGVMKVGYTEIDGKHFYFAENGEMQIGVFNTEDGFKYFAHHNEDLGNEEGEEISYSGILNFNNKIYYFDDSFTAVVGWKDLEDGSKYYFDEDTAEAYIGLSLINDGQYYFNDDGIMQVGFVTINDKVFYFSDSGIIESGVQNIDDNYFYIDDNGIVQIGVFDTSDGYKYFAPANTVNDNIYGQAVEYSGLVRVGEDVYYFGETYTIETGWIYDMENESDKYYFNPETKKACKGINLIDDIKYYFDEKGIMRTGLISFENNNYYFNENGEMQFGYINIEDKMFYFGEDGVMQIGVFNTPDGFKYFAHQNTLDENFEGESINYTGWLDLDEKRYYFTDEYIAATGSVIIDGEEYYFDPDTAQLVISEHHHHHH

SEQ ID NO: 196 - protein, 2710 aa, Clostridium difficile
MSLISKEELIKLAYSIRPRENEYKTILTNLDEYNKLTTNNNENKYLQLKKLNESIDVFMNKYKNSSRNRALSNLKKDILKEVILIKNSNTSPVEKNLHFVWIGGEVSDIALEYIKQWADINAEYNVKLWYDSEAFLVNTLKKAIVESSTTEALQLLEEEIQNPQFDNMKFYKKRMEFIYDRQKRFINYYKSQINKPTVPTIDDIIKSHLVSEYNRDETLLESYRTNSLRKINSNHGIDIRANSLFTEQELLNIYSQELLNRGNLAAASDIVRLLALKNFGGVYLDVDMLPGIHSDLFKTISRPSSIGLDRWEMIKLEAIMKYKKYINNYTSENFDKLDQQLKDNFKLIIESKSEKSEIFSKLENLNVSDLEIKIAFALGSVINQALISKQGSYLTNLVIEQVKNRYQFLNQHLNPAIESDNNFTDTTKIFHDSLFNSATAENSMFLTKIAPYLQVGFMPEARSTISLSGPGAYASAYYDFINLQENTIEKTLKASDLIEFKFPENNLSQLTEQEINSLWSFDQASAKYQFEKYVRDYTGGSLSEDNGVDFNKNTALDKNYLLNNKIPSNNVEEAGSKNYVHYIIQLQGDDISYEATCNLFSKNPKNSIIIQRNMNESAKSYFLSDDGESILELNKYRIPERLKNKEKVKVTFIGHGKDEFNTSEFARLSVDSLSNEISSFLDTIKLDISPKNVEVNLLGCNMFSYDFNVEETYPGKLLLSIMDKITSTLPDVNKDSITIGANQYEVRINSEGRKELLAHSGKWINKEEAIMSDLSSKEYIFFDSIDNKLKAKSKNIPGLASISEDIKTLLLDASVSPDTKFILNNLKLNIESSIGDYIYYEKLEPVKNIIHNSIDDLIDEFNLLENVSDELYELKKLNNLDEKYLISFEDISKNNSTYSVRFINKSNGESVYVETEKEIFSKYSEHITKEISTIKNSIITDVNGNLLDNIQLDHTSQVNTLNAAFFIQSLIDYSSNKDVLNDLSTSVKVQLYAQLFSTGLNTIYDSIQLVNLISNAVNDTINVLPTITEGIPIVSTILDGINLGAAIKELLDEHDPLLKKELEAKVGVLAINMSLSIAATVASIVGIGAEVTIFLLPIAGISAGIPSLVNNELILHDKATSVVNYFNHLSESKKYGPLKTEDDKILVPIDDLVISEIDFNNNSIKLGTCNILAMEGGSGHTVTGNIDHFFSSPYISSHIPSLSVYSAIGIKTENLDFSKKIMMLPNAPSRVFWWETGAVPGLRSLENDGTKLLDSIRDLYPGKFYWRFYAFFDYAITTLKPVYEDTNTKIKLDKDTRNFIMPTITTDEIRNKLSYSFDGAGGTYSLLLSSYPISMNINLSKDDLWIFNIDNEVREISIENGTIKKGNLIEDVLSKIDINKNKLIIGNQTIDFSGDIDNKDRYIFLTCELDDKISLIIEINLVAKSYSLLLSGDKNYLISNLSNTIEKINTLGLDSKNIAYNYTDESNNKYFGAISKTSQKSIIHYKKDSKNILEFYNGSTLEFNSKDFIAEDINVFMKDDINTITGKYYVDNNTDKSIDFSISLVSKNQVKVNGLYLNESVYSSYLDFVKNSDGHHNTSNFMNLFLNNISFWKLFGFENINFVIDKYFTLVGKTNLGYVEFICDNNKNIDIYFGEWKTSSSKSTIFSGNGRNVVVEPIYNPDTGEDISTSLDFSYEPLYGIDRYINKVLIAPDLYTSLININTNYYSNEYYPEIIVLNPNTFHKKVNINLDSSSFEYKWSTEGSDFILVRYLEESNKKILQKIRIKGILSNTQSFNKMSIDFKDIKKLSLGYIMSNFKSFNSENELDRDHLGFKIIDNKTYYYDEDSKLVKGLININNSLFYFDPIESNLVTGWQTINGKKYYFDINTGAASTSYKIINGKHFYFNNNGVMQLGVFKGPDGFEYFAPANTQNNNIEGQAIVYQSKFLTLNGKKYYFDNDSKAVTGWRIINNEKYYFNPNNAIAAVGLQVIDNNKYYFNPDTAIISKGWQTVNGSRYYFDTDTAIAFNGYKTIDGKHFYFDSDCVVKIGVFSGSNGFEYFAPANTYNNNIEGQAIVYQSKFLTLNGKKYYFDNNSKAVTGWQTIDSKKYYFNTNTAEAATGWQTIDGKKYYFNTNTAEAATGWQTIDGKKYYFNTNTSIASTGYTIINGKHFYFNTDGIMQIGVFKGPNGFEYFAPANTHNNNIEGQAILYQNKFLTLNGKKYYFGSDSKAITGWQTIDGKKYYFNPNNAIAATHLCTINNDKYYFSYDGILQNGYITIERNNFYFDANNESKMVTGVFKGPNGFEYFAPANTHNNNIEGQAIVYQNKFLTLNGKKYYFDNDSKAVTGWQTIDSKKYYFNLNTAVAVTGWQTIDGEKYYFNLNTAEAATGWQTIDGKRYYFNTNTYIASTGYTIINGKHFYFNTDGIMQIGVFKGPDGFEYFAPANTHNNNIEGQAILYQNKFLTLNGKKYYFGSDSKAVTGLRTIDGKKYYFNTNTAVAVTGWQTINGKKYYFNTNTYIASTGYTIISGKHFYFNTDGIMQIGVFKGPDGFEYFAPANTDANNIEGQAIRYQNRFLYLHDNIYYFGNDSKAATGWATIDGNRYYFEPNTAMGANGYKTIDNKNFYFRNGLPQIGVFKGPNGFEYFAPANTDANNIDGQAIRYQNRFLHLLGKIYYFGNNSKAVTGWQTINSKVYYFMPDTAMAAAGGLFEIDGVIYFFGVDGVKAPGIYG

SEQ ID NO: 197 - protein, 2710 aa, Clostridium difficile; identical to SEQ ID NO: 15

SEQ ID NO: 198 - protein, 2710 aa, Clostridium difficile; identical to SEQ ID NO: 92

SEQ ID NO: 199 - protein, 2710 aa, Clostridium difficile; identical to SEQ ID NO: 15

SEQ ID NO: 200 - protein, 2710 aa, Clostridium difficile; identical to SEQ ID NO: 15

SEQ ID NO: 201 - protein, 2710 aa, Clostridium difficile
MSLISKEELIKLAYSIRPRENEYKTILTNLDEYNKLTTNNNENKYLQLKKLNESIDVFMNKYKNSSRNRALSNLKKDILKEVILIKNSNTSPVEKNLHFVWIGGEVSDIALEYIKQWADINAEYNIKLWYDSEAFLVNTLKKAIVESSTTEALQLLEEEIQNPQFDNMKFYKKRMEFIYDRQKRFINYYKSQINKPTVPTIDDIIKSHLVSEYNRDETLLESYRTNSLRKINSNHGIDIRANSLFTEQELLNIYSQELLNRGNLAAASDIVRLLALKNFGGVYLDVDMLPGIHSDLFKTISRPSSIGLDRWEMIKLEAIMKYKKYINNYTSENFDKLDQQLKDNFKLIIESKSEKSEIFSKLENLNVSDLEIKIAFALGSVINQALISKQGSYLTNLVIEQVKNRYQFLNQHLNPAIESDNNFTDTTKIFHDSLFNSATAENSMFLTKIAPYLQVGFMPEARSTISLSGPGAYASAYYDFINLQENTIEKTLKASDLIEFKFPENNLSQLTEQEINSLWSFDQASAKYQFEKYVRDYTGGSLSEDNGVDFNKNTALDKNYLLNNKIPSNNVEEAGSKNYVHYIIQLQGDDISYEATCNLFSKNPKNSIIIQRNMNESAKSYFLSDDGESILELNKYRIPERLKNKEKVKVTFIGHGKDEFNTSEFARLSVDSLSNEISSFLDTIKLDISPKNVEVNLLGCNMFSYDFNVEETYPGKLLLSIMDKITSTLPDVNKDSITIGANQYEVRINSEGRKELLAHSGKWINKEEAIMSDLSSKEYIFFDSIDNKLKAKSKNIPGLASISEDIKTLLLDASVSPDTKFILNNLKLNIESSIGDYIYYEKLEPVKNIIHNSIDDLIDEFNLLENVSDELYELKKLNNLDEKYLISFEDISKNNSTYSVRFINKSNGESVYVETEKEIFSKYSEHITKEISTIKDSIITDVNGNLLDNIQLDHTSQVNTLNAAFFIQSLIDYSSNKDVLNDLSTSVKVQLYAQLFSTGLNTIYDSIQLVNLISNAVNDTINVLPTITEGIPIVSTILDGINLGAAIKELLDEHDPLLKKELEAKVGVLAINMSLSIAATVASIVGIGAEVTIFLLPIAGISAGIPSLVNNELILHDKATSVVNYFNHLSESKKYGPLKTEDDKILVPIDDLVISEIDFNNNSIKLGTCNILAMEGGSGHTVTGNIDHFFSSPYISSHIPSLSVYSAIGIKTENLDFSKKIMMLPNAPSRVFWWETGAVPGLRSLENDGTKLLDSIRDLYPGKFYWRFYAFFDYAITTLKPVYEDTNIKIKLDKDTRNFIMPTITTDEIRNKLSYSFDGAGGTYSLLLSSYPISMNINLSKDDLWIFNIDNEVREISIENGTIKKGNLIEDVLSKIDINKNKLIIGNQTIDFSGDIDNKDRYIFLTCELDDKISLIIEINLVAKSYSLLLSGDKNYLISNLSNTIEKINTLGLDSKNIAYNYTDESNNKYFGVISKTSQKSIIHYKKDSKNILEFYNGSTLEFNSKDFIAEDINVFMKDDINTITGKYYVDNNTDKSIDFSISLVSKNQVKVNGLYLNESVYSSYLDFVKNSDGHHNTSNFMNLFLNNISFWKLFGFENINFVIDKYFTLVGKTNLGYVEFICDNNKNIDIYFGEWKTSSSKSTIFSGNGRNVVVEPIYNPDTGEDISTSLDFSYEPLYGIDRYINKVLIAPDLYTSLININTNYYSNEYYPEIIVLNPNTFHKKVNINLDSSSFEYKWSTEGSDFILVRYLEESNKKILQKIRIKGILSNTQSFNKMSIDFKDIKKLSLGYIMSNFKSFNSENELDRDHLGFKIIDNKTYYYDEDSKLVKGLININNSLFYFDPIESNLVTGWQTINGKKYYFDINTGAASTSYKIINGKHFYFNNNGVMQLGVFKGPDGFEYFAPANTQNNNIEGQAIVYQSKFLTLNGKKYYFDNDSKAVSGWRIINNEKYYFNPNNAIAAVGLQVIDNNKYYFNPDTAIISKGWQTVNGSRYYFDTDTAIAFNGYKTIDGKHFYFDSDCVVKIGVFSGSNGFEYFAPANTYNNNIEGQAIVYQSKFLTLNGKKYYFDNNSKAVTGWQTIDSKKYYFNTNTAEAATGWQTIDGKKYYFNTNTAEAATGWQTIDGKKYYFNTNTSIASTGYTIINGKHFYFNTDGIMQIGVFKGPNGFEYFAPANTHNNNIEGQAILYQNKFLTLNGKKYYFGSDSKAITGWQTIDGKKYYFNPNNAIAATHLCTINNDKYYFSYDGILQNGYITIERNNFYFDANNESKMVTGVFKGPNGFEYFAPANTHNNNIEGQAIVYQNKFLTLNGKKYYFDNDSKAVTGWQTIDSKKYYFNLNTAVAVTGWQTIDGEKYYFNLNTAEAATGWQTIDGKRYYFNTNTYIASTGYTIINGKHFYFNTDGIMQIGVFKGPDGFEYFAPANTHNNNIEGQAILYQNKFLTLNGKKYYFGSDSKAVTGLRTIDGKKYYFNTNTAVAVTGWQTINGKKYYFNTNTSIASTGYTIISGKHFYFNTDGIMQIGVFKGPDGFEYFAPANTDANNIEGQAIRYQNRFLYLHDNIYYFGNDSKAATGWATIDGNRYYFEPNTAMGANGYKTIDNKNFYFRNGLPQIGVFKGPNGFEYFAPANTDANNIDGQAIRYQNRFLHLLGKIYYFGNNSKAVTGWQTINSKVYYFMPDTAMAAAGGLFEIDGVIYFFGVDGVKAPGIYG

SEQ ID NO: 202 - protein, 2710 aa, Clostridium difficile
MSLISKEELIKLAYSIRPRENEYKTILTNLDEYNKLTTNNNENKYLQLKKLNESIDVFMNKYKNSSRNRALSNLKKDILKEVILIKNSNTSPVEKNLHFVWIGGEVSDIALEYIKQWADINAEYNIKLWYDSEAFLVNTLKKAIVESSTTEALQLLEEEIQNPQFDNMKFYKKRMEFIYDRQKRFVNYYKSQINKPTVPTIDDIIKSHLVSEYNRDETLLESYRTNSLRKINSNHGIDIRANSLFTEQELLNIYSQELLNRGNLAAASDIVRLLALKNFGGVYLDVDMLPGIHSDLFKTISRPSSIGLDRWEMIKLEAIMKYKKYINNYTSENFDKLDQQLKDNFKLIIESKSEKSEIFSKLENLNVSDLEIKIAFALGSVINQALISKQGSYLTNLVIEQVKNRYQFLNQHLNPAIESDNNFTDTTKIFHDSLFNSATAENSMFLTKIAPYLQVGFMPEARSTISLSGPGAYASAYYDFINLQENTIEKTLKASDLIEFKFPENNLSQLTEQEINSLWSFDQASAKYQFEKYVRDYTGGSLSEDNEVDFNKNTALDKNYLLNNKIPSNNVEEAGSKNYVHYIIQLQGDDISYEATCNLFSKNPKNSIIIQRNMNESAKSYFLSDDGESILELNKYRIPERLKNKEKVKVTFIGHGKDEFNTSEFARLSVDSLSNEISSFLDTIKLDISPKNVEVNLLGCNMFSYDFNVEETYPGKLLLSIMDKITSTLPDVNKDSITIGANQYEVRINSEGRKELLAHSGKWINKEEAIMSDLSSKEYIFFDSIDNKLKAKSKNIPGLASISEDIKTLLLDTSVSPDTKFILNNLKLNIESSVGDYIYYEKLEPVKNIIHNSIDDLIDEFNLLENVSDELYELKKLNNLDEKYLISFEDISKNNSTYSVRFINKSNGESVYVETEKEIFSKYSEHITKEISTIKNSIITDVNGNLLDNIQLDHTSQVNTLNAAFFIQSLIDYSSNKDVLNDLSTSVKVQLYAQLFSTGLNTIYDSIQLVNLISNAVNDTINVLPTITEGIPIVSTILDGINLGAAIKELLDEHDPLLKKELEAKVGVLAINMSLSIAATVASIVGIGAEVTIFLLPIAGISAGIPSLVNNELILHDKATSVVNYFNHLSESKEYGPLKTEDDKILVPIDDLVISEIDFNNNAIKLGTCNILAMEGGSGHTVTGNIDHFFSSPSISSHIPSLSIYSAIGIKTENLDFSKKIMMLPNAPSRVFWWETGAVPGLRSLENNGTKLLDSIRDLYPGKFYWRFYAFFDYAITTLKPVYEDTNIKIKLDKDTRNFIMPTITTNEIRNKLSYSFDGAGGTYSLLLSSYPISTNINLSKDDLWIFNIDNEVREISIENGTIKKGKLIKDVLSKIDINKNKLIIGNQTIDFSGDIDNKDRYIFLTCELDDKISLIIEINLVAKSYSLLLSGDKNYLISNLSNTIEKINTLGLDSKNIAYNYTDESNNKYFGAISKTSQKSIIHYKKDSKNILEFYNGSTLEFNSKDFIAEDINVFMKDDINTITGKYYVDNNTDKSIDFSISLVSKNQAKVNGLYLNESVYSSYLDFVKNADGHHNTSNFMNLFLDNISFWKLFGFENINFVVDKYFTLVGKTNLGYVEFICDNNKNIDIYFGEWKTSSSKSTIFSGNGRNVVVEPIYNPDTGEDISTSLDFSYEPLYGIDRYINKVLIAPDLYTSLININTNYYSNEYYPEIIVLNPNTFHKKVNINLDSSSFEYKWSTEGSDFILVRYLEESNKKILQKIRIKGILSNTQSFNKKSIDFKDIKKLSLVYIMSNFKSFNSENELDRDHLGFKIIDNKTYYYDEASKLVKGLININNSLFYFDPIESNLVTGWQTINGKKYYFDINTGAALTSYKIINGKHFYFNNNGVMQLGVFKGPDGFEYFAPANTQNNNIEGQAIVYQSKFLTLNGKKYYFDNDSKAVTGWRIINNEKYYFNPNNAIAAVGLQVIDNNKYYFNPDTAIISKGWQTVNGSRYYFDTDTAIAFNGYKTIDGKHFYFDSDCVVKIGVFSGSNGFEYFAPANTYNNNIEGQAIVYQSKFLTLNGEKYYFDNNSKAVTGWQTIDSKKYYFNTNTAEAATGWQTIDGKKYYFNTNTAEVATGWQTIDGKKYYFNTNTSIASTGYTIINGKHFYFNTDGIMQIGVFKGPDGFEYFAPANTDANNIEGQAILYQNKFLTLNDKKYYFASDSKAVTGWRIINNKKYYFNPNNAIAATHLYTINNDKYYFSYDGILQNGYITIERNNFYFDANNESKMVTGVFKGPNGFEYFAPANTHNNNIEGQAIVYQNKFLTLNGKKYYFDNDSKAVTGWQTIDGKKYYFNLNTAVAVTGWQTIDGKKYYFNTNTAEAATGWQTIDGKKYYFNTNTSIASTGYTIINGKHFYFNTDGIMQIGVFKGPDGFEYFAPANTDANNIEGQAILYQNKFLTLNGKKYYFASDSKAVTGLRTIDGKKYYFNTNTAEAATGWQTIDGKKYYFNTNTSIASTGYTIINDKHFYFNTDGIMQIGVFKGPDGFEYFAPANTDANNIEGQAIRYQNRFLYLHDNIYYFGNNSKAATGWVTIDGRRYYFEPNTAIGANGYKIIDNKNFYFRNGLPQIGVFKGPNGFEYFAPANTDANNIDGQAIRYQNRFLHLLGNIYYFGNNSKAVTGWQTINGNMYYFMPDTAMAAAGGLFEIDGVIYFFGVDGVKAPGIYG

SEQ ID NO: 203 - protein, 2710 aa, synthetic construct
  REGION 1..2710: note = Synthetic amino acid sequence
GSLISKEELIKLAYSIRPRENEYKTILTNLDEYNKLTTNNNENKYLQLKKLNESIDVFMNKYKTSSRNRALSNLKKDILKEVILIKNSNTSPVEKNLHFVAIGGEVSDIALEYIKQWADINAEYNIKLWYDSEAFLVNTLKKAIVESSTTEALQLLEEEIQNPQFDNMKFYKKRMEFIYDRQKRFINYYKSQINKPTVPTIDDIIKSHLVSEYNRDETVLESYRTNSLRKINSNHGIDIRANSLFTEQELLNIYSQELLNRGNLAAASDIVRLLALKNFGGVYLDVAMLPGIHSDLFKTISRPSSIGLDRWEMIKLEAIMKYKKYINNYTSENFDKLDQQLKDNFKLIIESKSEKSEIFSKLENLNVSDLEIKIAFALGSVINQALISKQGSYLTNLVIEQVKNRYQFLNQHLNPAIESDNNFTDTTKIFHDSLFNSATAENSMFLTKIAPYLQVGFMPEARSTISLSGPGAYASAYYDFINLQENTIEKTLKASDLIEFKFPENNLSQLTEQQINSLWSFDQASAKYQFEKYVRDYTGGSLSEDNGVDFNKNTALDKNYLLNNKIPSNNVEEAGSKNYVHYIIQLQGDDISYEATCNLFSKNPKNSIIIQRNMNESAKSYFLSDDGESILELNKYRIPERLKNKEKVKVTFIGHGKDEFNTSEFARLSVDSLSNEISSFLDTIKLDISPKNVEVNLLGCNMFSYDFNVEETYPGKLLLSIMDKITSTLPDVNKNSITIGANQYEVRINSEGRKELLAHSGKWINKEEAIMSDLSSKEYIFFDSIDNKLKAKSKNIPGLASISEDIKTLLLDASVSPDTKFILNNLKLNIESSIGDYIYYEKLEPVKNIIHNSIDDLIDEFNLLENVSDELYELKKLNNLDEKYLISFEDISKNNSTYSVRFINKSNGESVYVETEKEIFSKYSEHITKEISTIKNSIITDVNGNLLDNIQLDHTSQVNTLNAAFFIQSLIDYSSNKDVLNDLSTSVKVQLYAQLFSTGLNTIYDSIQLVNLISNAVNDTINVLPTITEGIPIVSTILDGINLGAAIKELLDEHDPLLKKELEAKVGVLAINMSLSIAATVASIVGIGAEVTIFLLPIAGISAGIPSLVNNELILHDKATSVVNYFNHLSESKKYGPLKTEDDKILVPIDDLVISEIDFNNNSIKLGTCNILAMEGGSGHTVTGNIDHFFSSPSISSHIPSLSIYSAIGIETENLDFSKKIMMLPNAPSRVFWWETGAVPGLRSLENDGTRLLDSIRDLYPGKFYWRFYAFFDYAITTLKPVYEDTNIKIKLDKDTRNFIMPTITTNEIRNKLSYSFDGAGGTYSLLLSSYPISTNINLSKDDLWIFNIDNEVREISIENGTIKKGKLIKDVLSKIDINKNKLIIGNQTIDFSGDIDNKDRYIFLTCELDDKISLIIEINLVAKSYSLLLSGDKNYLISNLSNTIEKINTLGLDSKNIAYNYTDESNNKYFGAISKTSQKSIIHYKKDSKNILEFYNDSTLEFNSKDFIAEDINVFMKDDINTITGKYYVDNNTDKSIDFSISLVSKNQVKVNGLYLNESVYSSYLDFVKNSDGHHNTSNFMNLFLDNISFWKLFGFENINFVIDKYFTLVGKTNLGYVEFICDNNKNIDIYFGEWKTSSSKSTIFSGNGRNVVVEPIYNPDTGEDISTSLDFSYEPLYGIDRYINKVLIAPDLYTSLININTNYYSNEYYPEIIVLNPNTFHKKVNINLDSSSFEYKWSTEGSDFILVRYLEESNKKILQKIRIKGILSNTQSFNKMSIDFKDIKKLSLGYIMSNFKSFNSENELDRDHLGFKIIDNKTYYYDEDSKLVKGLININNSLFYFDPIEFNLVTGWQTINGKKYYFDINTGAALTSYKIINGKHFYFNNDGVMQLGVFKGPDGFEYFAPANTQNNNIEGQAIVYQSKFLTLNGKKYYFDNNSKAVTGWRIINNEKYYFNPNNAIAAVGLQVIDNNKYYFNPDTAIISKGWQTVNGSRYYFDTDTAIAFNGYKTIDGKHFYFDSDCVVKIGVFSTSNGFEYFAPANTYNNNIEGQAIVYQSKFLTLNGKKYYFDNNSKAVTGLQTIDSKKYYFNTNTAEAATGWQTIDGKKYYFNTNTAEAATGWQTIDGKKYYFNTNTAIASTGYTIINGKHFYFNTDGIMQIGVFKGPNGFEYFAPANTDANNIEGQAILYQNEFLTLNGKKYYFGSDSKAVTGWRIINNKKYYFNPNNAIAAIHLCTINNDKYYFSYDGILQNGYITIERNNFYFDANNESKMVTGVFKGPNGFEYFAPANTHNNNIEGQAIVYQNKFLTLNGKKYYFDNDSKAVTGWQTIDGKKYYFNLNTAEAATGWQTIDGKKYYFNLNTAEAATGWQTIDGKKYYFNTNTFIASTGYTSINGKHFYFNTDGIMQIGVFKGPNGFEYFAPANTDANNIEGQAILYQNKFLTLNGKKYYFGSDSKAVTGLRTIDGKKYYFNTNTAVAVTGWQTINGKKYYFNTNTSIASTGYTIISGKHFYFNTDGIMQIGVFKGPDGFEYFAPANTDANNIEGQAIRYQNRFLYLHDNIYYFGNNSKAATGWVTIDGNRYYFEPNTAMGANGYKTIDNKNFYFRNGLPQIGVFKGSNGFEYFAPANTDANNIEGQAIRYQNRFLHLLGKIYYFGNNSKAVTGWQTINGKVYYFMPDTAMAAAGGLFEIDGVIYFFGVDGVKAPGIYG

SEQ ID NO: 204 - protein, 2709 aa, synthetic construct
  REGION 1..2709: note = Synthetic amino acid sequence
GSLISKEELIKLAYSIRPRENEYKTILTNLDEYNKLTTNNNENKYLQLKKLNESIDVFMNKYKTSSRNRALSNLKKDILKEVILIKNSNTSPVEKNLHFVIGGEVSDIALEYIKQWADINAEYNIKLWYDSEAFLVNTLKKAIVESSTTEALQLLEEEIQNPQFDNMKFYKKRMEFIYDRQKRFINYYKSQINKPTVPTIDDIIKSHLVSEYNRDETVLESYRTNSLRKINSNHGIDIRANSLFTEQELLNIYSQELLNRGNLAAASDIVRLLALKNFGGVYLDVDMLPGIHSDLFKTISRPSSIGLDRWEMIKLEAIMKYKKYINNYTSENFDKLDQQLKDNFKLIIESKSEKSEIFSKLENLNVSDLEIKIAFALGSVINQALISKQGSYLTNLVIEQVKNRYQFLNQHLNPAIESDNNFTDTTKIFHDSLFNSATAENSMFLTKIAPYLQVGFMPEARSTISLSGPGAYASAYYDFINLQENTIEKTLKASDLIEFKFPENNLSQLTEQEINSLWSFDQASAKYQFEKYVRDYTGGSLSEDNGVDFNKNTALDKNYLLNNKIPSNNVEEAGSKNYVHYIIQLQGDDISYEATCNLFSKNPKNSIIIQRNMNESAKSYFLSDDGESILELNKYRIPERLKNKEKVKVTFIGHGKDEFNTSEFARLSVDSLSNEISSFLDTIKLDISPKNVEVNLLGCNMFSYDFNVEETYPGKLLLSIMDKITSTLPDVNKNSITIGANQYEVRINSEGRKELLAHSGKWINKEEAIMSDLSSKEYIFFDSIDNKLKAKSKNIPGLASISEDIKTLLLDASVSPDTKFILNNLKLNIESSIGDYIYYEKLEPVKNIIHNSIDDLIDEFNLLENVSDELYELKKLNNLDEKYLISFEDISKNNSTYSVRFINKSNGESVYVETEKEIFSKYSEHITKEISTIKNSIITDVNGNLLDNIQLDHTSQVNTLNAAFFIQSLIDYSSNKDVLNDLSTSVKVQLYAQLFSTGLNTIYDSIQLVNLISNAVNDTINVLPTITEGIPIVSTILDGINLGAAIKELLDEHDPLLKKELEAKVGVLAINMSLSIAATVASIVGIGAEVTIFLLPIAGISAGIPSLVNNELILHDKATSVVNYFNHLSESKKYGPLKTEDDKILVPIDDLVISEIDFNNNSIKLGTCNILAMEGGSGHTVTGNIDHFFSSPSISSHIPSLSIYSAIGIETENLDFSKKIMMLPNAPSRVFWWETGAVPGLRSLENDGTRLLDSIRDLYPGKFYWRFYAFFDYAITTLKPVYEDTNIKIKLDKDTRNFIMPTITTNEIRNKLSYSFDGAGGTYSLLLSSYPISTNINLSKDDLWIFNIDNEVREISIENGTIKKGKLIKDVLSKIDINKNKLIIGNQTIDFSGDIDNKDRYIFLTCELDDKISLIIEINLVAKSYSLLLSGDKNYLISNLSNTIEKINTLGLDSKNIAYNYTDESNNKYFGAISKTSQKSIIHYKKDSKNILEFYNDSTLEFNSKDFIAEDINVFMKDDINTITGKYYVDNNTDKSIDFSISLVSKNQVKVNGLYLNESVYSSYLDFVKNSDGHHNTSNFMNLFLDNISFWKLFGFENINFVIDKYFTLVGKTNLGYVEFICDNNKNIDIYFGEWKTSSSKSTIFSGNGRNVVVEPIYNPDTGEDISTSLDFSYEPLYGIDRYINKVLIAPDLYTSLININTNYYSNEYYPEIIVLNPNTFHKKVNINLDSSSFEYKWSTEGSDFILVRYLEESNKKILQKIRIKGILSNTQSFNKMSIDFKDIKKLSLGYIMSNFKSFNSENELDRDHLGFKIIDNKTYYYDEDSKLVKGLININNSLFYFDPIEFNLVTGWQTINGKKYYFDINTGAALTSYKIINGKHFYFNNDGVMQLGVFKGPDGFEYFAPANTQNNNIEGQAIVYQSKFLTLNGKKYYFDNNSKAVTGWRIINNEKYYFNPNNAIAAVGLQVIDNNKYYFNPDTAIISKGWQTVNGSRYYFDTDTAIAFNGYKTIDGKHFYFDSDCVVKIGVFSTSNGFEYFAPANTYNNNIEGQAIVYQSKFLTLNGKKYYFDNNSKAVTGLQTIDSKKYYFNTNTAEAATGWQTIDGKKYYFNTNTAEAATGWQTIDGKKYYFNTNTAIASTGYTIINGKHFYFNTDGIMQIGVFKGPNGFEYFAPANTDANNIEGQAILYQNEFLTLNGKKYYFGSDSKAVTGWRIINNKKYYFNPNNAIAAIHLCTINNDKYYFSYDGILQNGYITIERNNFYFDANNESKMVTGVFKGPNGFEYFAPANTHNNNIEGQAIVYQNKFLTLNGKKYYFDNDSKAVTGWQTIDGKKYYFNLNTAEAATGWQTIDGKKYYFNLNTAEAATGWQTIDGKKYYFNTNTFIASTGYTSINGKHFYFNTDGIMQIGVFKGPNGFEYFAPANTDANNIEGQAILYQNKFLTLNGKKYYFGSDSKAVTGLRTIDGKKYYFNTNTAVAVTGWQTINGKKYYFNTNTSIASTGYTIISGKHFYFNTDGIMQIGVFKGPDGFEYFAPANTDANNIEGQAIRYQNRFLYLHDNIYYFGNNSKAATGWVTIDGNRYYFEPNTAMGANGYKTIDNKNFYFRNGLPQIGVFKGSNGFEYFAPANTDANNIEGQAIRYQNRFLHLLGKIYYFGNNSKAVTGWQTINGKVYYFMPDTAMAAAGGLFEIDGVIYFFGVDGVKAPGIYG

SEQ ID NO: 205 - protein, 2709 aa, synthetic construct
  REGION 1..2709: note = Synthetic amino acid sequence
SLISKEELIKLAYSIRPRENEYKTILTNLDEYNKLTTNNNENKYLQLKKLNESIDVFMNKYKTSSRNRALSNLKKDILKEVILIKNSNTSPVEKNLHFVAIGGEVSDIALEYIKQWADINAEYNIKLWYDSEAFLVNTLKKAIVESSTTEALQLLEEEIQNPQFDNMKFYKKRMEFIYDRQKRFINYYKSQINKPTVPTIDDIIKSHLVSEYNRDETVLESYRTNSLRKINSNHGIDIRANSLFTEQELLNIYSQELLNRGNLAAASDIVRLLALKNFGGVYLDVAMLPGIHSDLFKTISRPSSIGLDRWEMIKLEAIMKYKKYINNYTSENFDKLDQQLKDNFKLIIESKSEKSEIFSKLENLNVSDLEIKIAFALGSVINQALISKQGSYLTNLVIEQVKNRYQFLNQHLNPAIESDNNFTDTTKIFHDSLFNSATAENSMFLTKIAPYLQVGFMPEARSTISLSGPGAYASAYYDFINLQENTIEKTLKASDLIEFKFPENNLSQLTEQQINSLWSFDQASAKYQFEKYVRDYTGGSLSEDNGVDFNKNTALDKNYLLNNKIPSNNVEEAGSKNYVHYIIQLQGDDISYEATCNLFSKNPKNSIIIQRNMNESAKSYFLSDDGESILELNKYRIPERLKNKEKVKVTFIGHGKDEFNTSEFARLSVDSLSNEISSFLDTIKLDISPKNVEVNLLGCNMFSYDFNVEETYPGKLLLSIMDKITSTLPDVNKNSITIGANQYEVRINSEGRKELLAHSGKWINKEEAIMSDLSSKEYIFFDSIDNKLKAKSKNIPGLASISEDIKTLLLDASVSPDTKFILNNLKLNIESSIGDYIYYEKLEPVKNIIHNSIDDLIDEFNLLENVSDELYELKKLNNLDEKYLISFEDISKNNSTYSVRFINKSNGESVYVETEKEIFSKYSEHITKEISTIKNSIITDVNGNLLDNIQLDHTSQVNTLNAAFFIQSLIDYSSNKDVLNDLSTSVKVQLYAQLFSTGLNTIYDSIQLVNLISNAVNDTINVLPTITEGIPIVSTILDGINLGAAIKELLDEHDPLLKKELEAKVGVLAINMSLSIAATVASIVGIGAEVTIFLLPIAGISAGIPSLVNNELILHDKATSVVNYFNHLSESKKYGPLKTEDDKILVPIDDLVISEIDFNNNSIKLGTCNILAMEGGSGHTVTGNIDHFFSSPSISSHIPSLSIYSAIGIETENLDFSKKIMMLPNAPSRVFWWETGAVPGLRSLENDGTRLLDSIRDLYPGKFYWRFYAFFDYAITTLKPVYEDTNIKIKLDKDTRNFIMPTITTNEIRNKLSYSFDGAGGTYSLLLSSYPISTNINLSKDDLWIFNIDNEVREISIENGTIKKGKLIKDVLSKIDINKNKLIIGNQTIDFSGDIDNKDRYIFLTCELDDKISLIIEINLVAKSYSLLLSGDKNYLISNLSNTIEKINTLGLDSKNIAYNYTDESNNKYFGAISKTSQKSIIHYKKDSKNILEFYNDSTLEFNSKDFIAEDINVFMKDDINTITGKYYVDNNTDKSIDFSISLVSKNQVKVNGLYLNESVYSSYLDFVKNSDGHHNTSNFMNLFLDNISFWKLFGFENINFVIDKYFTLVGKTNLGYVEFICDNNKNIDIYFGEWKTSSSKSTIFSGNGRNVVVEPIYNPDTGEDISTSLDFSYEPLYGIDRYINKVLIAPDLYTSLININTNYYSNEYYPEIIVLNPNTFHKKVNINLDSSSFEYKWSTEGSDFILVRYLEESNKKILQKIRIKGILSNTQSFNKMSIDFKDIKKLSLGYIMSNFKSFNSENELDRDHLGFKIIDNKTYYYDEDSKLVKGLININNSLFYFDPIEFNLVTGWQTINGKKYYFDINTGAALTSYKIINGKHFYFNNDGVMQLGVFKGPDGFEYFAPANTQNNNIEGQAIVYQSKFLTLNGKKYYFDNNSKAVTGWRIINNEKYYFNPNNAIAAVGLQVIDNNKYYFNPDTAIISKGWQTVNGSRYYFDTDTAIAFNGYKTIDGKHFYFDSDCVVKIGVFSTSNGFEYFAPANTYNNNIEGQAIVYQSKFLTLNGKKYYFDNNSKAVTGLQTIDSKKYYFNTNTAEAATGWQTIDGKKYYFNTNTAEAATGWQTIDGKKYYFNTNTAIASTGYTIINGKHFYFNTDGIMQIGVFKGPNGFEYFAPANTDANNIEGQAILYQNEFLTLNGKKYYFGSDSKAVTGWRIINNKKYYFNPNNAIAAIHLCTINNDKYYFSYDGILQNGYITIERNNFYFDANNESKMVTGVFKGPNGFEYFAPANTHNNNIEGQAIVYQNKFLTLNGKKYYFDNDSKAVTGWQTIDGKKYYFNLNTAEAATGWQTIDGKKYYFNLNTAEAATGWQTIDGKKYYFNTNTFIASTGYTSINGKHFYFNTDGIMQIGVFKGPNGFEYFAPANTDANNIEGQAILYQNKFLTLNGKKYYFGSDSKAVTGLRTIDGKKYYFNTNTAVAVTGWQTINGKKYYFNTNTSIASTGYTIISGKHFYFNTDGIMQIGVFKGPDGFEYFAPANTDANNIEGQAIRYQNRFLYLHDNIYYFGNNSKAATGWVTIDGNRYYFEPNTAMGANGYKTIDNKNFYFRNGLPQIGVFKGSNGFEYFAPANTDANNIEGQAIRYQNRFLHLLGKIYYFGNNSKAVTGWQTINGKVYYFMPDTAMAAAGGLFEIDGVIYFFGVDGVKAPGIYG

SEQ ID NO: 206 - protein, 2709 aa, synthetic construct
  REGION 1..2709: note = Synthetic amino acid sequence
SLISKEELIKLAYSIRPRENEYKTILTNLDEYNKLTTNNNENKYLQLKKLNESIDVFMNKYKTSSRNRALSNLKKDILKEVILIKNSNTSPVEKNLHFVAIGGEVSDIALEYIKQWADINAEYNIKLWYDSEAFLVNTLKKAIVESSTTEALQLLEEEIQNPQFDNMKFYKKRMEFIYDRQKRFINYYKSQINKPTVPTIDDIIKSHLVSEYNRDETVLESYRTNSLRKINSNHGIDIRANSLFTEQELLNIYSQELLNRGNLAAASDIVRLLALKNFGGVYLAVAMLPGIHSDLFKTISRPSSIGLDRWEMIKLEAIMKYKKYINNYTSENFDKLDQQLKDNFKLIIESKSEKSEIFSKLENLNVSDLEIKIAFALGSVINQALISKQGSYLTNLVIEQVKNRYQFLNQHLNPAIESDNNFTDTTKIFHDSLFNSATAENSMFLTKIAPYLQVGFMPEARSTISLSGPGAYASAYYDFINLQENTIEKTLKASDLIEFKFPENNLSQLTEQQINSLWSFDQASAKYQFEKYVRDYTGGSLSEDNGVDFNKNTALDKNYLLNNKIPSNNVEEAGSKNYVHYIIQLQGDDISYEATCNLFSKNPKNSIIIQRNMNESAKSYFLSDDGESILELNKYRIPERLKNKEKVKVTFIGHGKDEFNTSEFARLSVDSLSNEISSFLDTIKLDISPKNVEVNLLGCNMFSYDFNVEETYPGKLLLSIMDKITSTLPDVNKNSITIGANQYEVRINSEGRKELLAHSGKWINKEEAIMSDLSSKEYIFFDSIDNKLKAKSKNIPGLASISEDIKTLLLDASVSPDTKFILNNLKLNIESSIGDYIYYEKLEPVKNIIHNSIDDLIDEFNLLENVSDELYELKKLNNLDEKYLISFEDISKNNSTYSVRFINKSNGESVYVETEKEIFSKYSEHITKEISTIKNSIITDVNGNLLDNIQLDHTSQVNTLNAAFFIQSLIDYSSNKDVLNDLSTSVKVQLYAQLFSTGLNTIYDSIQLVNLISNAVNDTINVLPTITEGIPIVSTILDGINLGAAIKELLDEHDPLLKKELEAKVGVLAINMSLSIAATVASIVGIGAEVTIFLLPIAGISAGIPSLVNNELILHDKATSVVNYFNHLSESKKYGPLKTEDDKILVPIDDLVISEIDFNNNSIKLGTCNILAMEGGSGHTVTGNIDHFFSSPSISSHIPSLSIYSAIGIETENLDFSKKIMMLPNAPSRVFWWETGAVPGLRSLENDGTRLLDSIRDLYPGKFYWRFYAFFDYAITTLKPVYEDTNIKIKLDKDTRNFIMPTITTNEIRNKLSYSFDGAGGTYSLLLSSYPISTNINLSKDDLWIFNIDNEVREISIENGTIKKGKLIKDVLSKIDINKNKLIIGNQTIDFSGDIDNKDRYIFLTCELDDKISLIIEINLVAKSYSLLLSGDKNYLISNLSNTIEKINTLGLDSKNIAYNYTDESNNKYFGAISKTSQKSIIHYKKDSKNILEFYNDSTLEFNSKDFIAEDINVFMKDDINTITGKYYVDNNTDKSIDFSISLVSKNQVKVNGLYLNESVYSSYLDFVKNSDGHHNTSNFMNLFLDNISFWKLFGFENINFVIDKYFTLVGKTNLGYVEFICDNNKNIDIYFGEWKTSSSKSTIFSGNGRNVVVEPIYNPDTGEDISTSLDFSYEPLYGIDRYINKVLIAPDLYTSLININTNYYSNEYYPEIIVLNPNTFHKKVNINLDSSSFEYKWSTEGSDFILVRYLEESNKKILQKIRIKGILSNTQSFNKMSIDFKDIKKLSLGYIMSNFKSFNSENELDRDHLGFKIIDNKTYYYDEDSKLVKGLININNSLFYFDPIEFNLVTGWQTINGKKYYFDINTGAALTSYKIINGKHFYFNNDGVMQLGVFKGPDGFEYFAPANTQNNNIEGQAIVYQSKFLTLNGKKYYFDNNSKAVTGWRIINNEKYYFNPNNAIAAVGLQVIDNNKYYFNPDTAIISKGWQTVNGSRYYFDTDTAIAFNGYKTIDGKHFYFDSDCVVKIGVFSTSNGFEYFAPANTYNNNIEGQAIVYQSKFLTLNGKKYYFDNNSKAVTGLQTIDSKKYYFNTNTAEAATGWQTIDGKKYYFNTNTAEAATGWQTIDGKKYYFNTNTAIASTGYTIINGKHFYFNTDGIMQIGVFKGPNGFEYFAPANTDANNIEGQAILYQNEFLTLNGKKYYFGSDSKAVTGWRIINNKKYYFNPNNAIAAIHLCTINNDKYYFSYDGILQNGYITIERNNFYFDANNESKMVTGVFKGPNGFEYFAPANTHNNNIEGQAIVYQNKFLTLNGKKYYFDNDSKAVTGWQTIDGKKYYFNLNTAEAATGWQTIDGKKYYFNLNTAEAATGWQTIDGKKYYFNTNTFIASTGYTSINGKHFYFNTDGIMQIGVFKGPNGFEYFAPANTDANNIEGQAILYQNKFLTLNGKKYYFGSDSKAVTGLRTIDGKKYYFNTNTAVAVTGWQTINGKKYYFNTNTSIASTGYTIISGKHFYFNTDGIMQIGVFKGPDGFEYFAPANTDANNIEGQAIRYQNRFLYLHDNIYYFGNNSKAATGWVTIDGNRYYFEPNTAMGANGYKTIDNKNFYFRNGLPQIGVFKGSNGFEYFAPANTDANNIEGQAIRYQNRFLHLLGKIYYFGNNSKAVTGWQTINGKVYYFMPDTAMAAAGGLFEIDGVIYFFGVDGVKAPGIYG

SEQ ID NO: 207 - protein, 2709 aa, synthetic construct
  REGION 1..2709: note = Synthetic amino acid sequence
SLISKEELIKLAYSIRPRENEYKTILTNLDEYNKLTTNNNENKYLQLKKLNESIDVFMNKYKTSSRNRALSNLKKDILKEVILIKNSNTSPVEKNLHFVAIGGEVSDIALEYIKQWADINAEYNIKLWYDSEAFLVNTLKKAIVESSTTEALQLLEEEIQNPQFDNMKFYKKRMEFIYDRQKRFINYYKSQINKPTVPTIDDIIKSHLVSEYNRDETVLESYRTNSLRKINSNHGIDIRANSLFTEQELLNIYSQELLNRGNLAAASDIVRLLALKNFGGVYLDVAMLPGIHSDLFKTISRPSSIGLDRWEMIKLEAIMKYKKYINNYTSENFDKLDQQLKDNFKLIIESKSEKSEIFSKLENLNVSDLEIKIAFALGSVINQALISKQGSYLTNLVIEQVKNRYQFLNQHLNPAIESDNNFTDTTKIFHDSLFNSATAENSMFLTKIAPYLQVGFMPEARSTISLSGPGAYASAYYDFINLQENTIEKTLKASDLIEFKFPENNLSQLTEQQINALWSFDQASAKYQFEKYVRDYTGGSLSEDNGVDFNKNTALDKNYLLNNKIPSNNVEEAGSKNYVHYIIQLQGDDISYEATCNLFSKNPKNSIIIQRNMNESAKSYFLSDDGESILELNKYRIPERLKNKEKVKVTFIGHGKDEFNTSEFARLSVDSLSNEISSFLDTIKLDISPKNVEVNLLGCNMFSYDFNVEETYPGKLLLSIMDKITSTLPDVNKNSITIGANQYEVRINSEGRKELLAHSGKWINKEEAIMSDLSSKEYIFFDSIDNKLKAKSKNIPGLASISEDIKTLLLDASVSPDTKFILNNLKLNIESSIGDYIYYEKLEPVKNIIHNSIDDLIDEFNLLENVSDELYELKKLNNLDEKYLISFEDISKNNSTYSVRFINKSNGESVYVETEKEIFSKYSEHITKEISTIKNSIITDVNGNLLDNIQLDHTSQVNTLNAAFFIQSLIDYSSNKDVLNDLSTSVKVQLYAQLFSTGLNTIYDSIQLVNLISNAVNDTINVLPTITEGIPIVSTILDGINLGAAIKELLDEHDPLLKKELEAKVGVLAINMSLSIAATVASIVGIGAEVTIFLLPIAGISAGIPSLVNNELILHDKATSVVNYFNHLSESKKYGPLKTEDDKILVPIDDLVISEIDFNNNSIKLGTCNILAMEGGSGHTVTGNIDHFFSSPSISSHIPSLSIYSAIGIETENLDFSKKIMMLPNAPSRVFWWETGAVPGLRSLENDGTRLLDSIRDLYPGKFYWRFYAFFDYAITTLKPVYEDTNIKIKLDKDTRNFIMPTITTNEIRNKLSYSFDGAGGTYSLLLSSYPISTNINLSKDDLWIFNIDNEVREISIENGTIKKGKLIKDVLSKIDINKNKLIIGNQTIDFSGDIDNKDRYIFLTCELDDKISLIIEINLVAKSYSLLLSGDKNYLISNLSNTIEKINTLGLDSKNIAYNYTDESNNKYFGAISKTSQKSIIHYKKDSKNILEFYNDSTLEFNSKDFIAEDINVFMKDDINTITGKYYVDNNTDKSIDFSISLVSKNQVKVNGLYLNESVYSSYLDFVKNSDGHHNTSNFMNLFLDNISFWKLFGFENINFVIDKYFTLVGKTNLGYVEFICDNNKNIDIYFGEWKTSSSKSTIFSGNGRNVVVEPIYNPDTGEDISTSLDFSYEPLYGIDRYINKVLIAPDLYTSLININTNYYSNEYYPEIIVLNPNTFHKKVNINLDSSSFEYKWSTEGSDFILVRYLEESNKKILQKIRIKGILSNTQSFNKMSIDFKDIKKLSLGYIMSNFKSFNSENELDRDHLGFKIIDNKTYYYDEDSKLVKGLININNSLFYFDPIEFNLVTGWQTINGKKYYFDINTGAALTSYKIINGKHFYFNNDGVMQLGVFKGPDGFEYFAPANTQNNNIEGQAIVYQSKFLTLNGKKYYFDNNSKAVTGWRIINNEKYYFNPNNAIAAVGLQVIDNNKYYFNPDTAIISKGWQTVNGSRYYFDTDTAIAFNGYKTIDGKHFYFDSDCVVKIGVFSTSNGFEYFAPANTYNNNIEGQAIVYQSKFLTLNGKKYYFDNNSKAVTGLQTIDSKKYYFNTNTAEAATGWQTIDGKKYYFNTNTAEAATGWQTIDGKKYYFNTNTAIASTGYTIINGKHFYFNTDGIMQIGVFKGPNGFEYFAPANTDANNIEGQAILYQNEFLTLNGKKYYFGSDSKAVTGWRIINNKKYYFNPNNAIAAIHLCTINNDKYYFSYDGILQNGYITIERNNFYFDANNESKMVTGVFKGPNGFEYFAPANTHNNNIEGQAIVYQNKFLTLNGKKYYFDNDSKAVTGWQTIDGKKYYFNLNTAEAATGWQTIDGKKYYFNLNTAEAATGWQTIDGKKYYFNTNTFIASTGYTSINGKHFYFNTDGIMQIGVFKGPNGFEYFAPANTDANNIEGQAILYQNKFLTLNGKKYYFGSDSKAVTGLRTIDGKKYYFNTNTAVAVTGWQTINGKKYYFNTNTSIASTGYTIISGKHFYFNTDGIMQIGVFKGPDGFEYFAPANTDANNIEGQAIRYQNRFLYLHDNIYYFGNNSKAATGWVTIDGNRYYFEPNTAMGANGYKTIDNKNFYFRNGLPQIGVFKGSNGFEYFAPANTDANNIEGQAIRYQNRFLHLLGKIYYFGNNSKAVTGWQTINGKVYYFMPDTAMAAAGGLFEIDGVIYFFGVDGVKAPGIYG

SEQ ID NO: 208 - protein, 2709 aa, synthetic construct
  REGION 1..2709: note = Synthetic amino acid sequence
SLISKEELIKLAYSIRPRENEYKTILTNLDEYNKLTTNNNENKYLQLKKLNESIDVFMNKYKTSSRNRALSNLKKDILKEVILIKNSNTSPVEKNLHFVAIGGEVSDIALEYIKQWADINAEYNIKLWYDSEAFLVNTLKKAIVESSTTEALQLLEEEIQNPQFDNMKFYKKRMEFIYDRQKRFINYYKSQINKPTVPTIDDIIKSHLVSEYNRDETVLESYRTNSLRKINSNHGIDIRANSLFTEQELLNIYSQELLNRGNLAAASDIVRLLALKNFGGVYLDVAMLPGIHSDLFKTISRPSSIGLDRWEMIKLEAIMKYKKYINNYTSENFDKLDQQLKDNFKLIIESKSEKSEIFSKLENLNVSDLEIKIAFALGSVINQALISKQGSYLTNLVIEQVKNRYQFLNQHLNPAIESDNNFTDTTKIFHDSLFNSATAENSMFLTKIAPYLQVGFMPEARSTISLSGPGAYASAYYDFINLQENTIEKTLKASDLIEFKFPENNLSQLTEQQINSLASFDQASAKYQFEKYVRDYTGGSLSEDNGVDFNKNTALDKNYLLNNKIPSNNVEEAGSKNYVHYIIQLQGDDISYEATCNLFSKNPKNSIIIQRNMNESAKSYFLSDDGESILELNKYRIPERLKNKEKVKVTFIGHGKDEFNTSEFARLSVDSLSNEISSFLDTIKLDISPKNVEVNLLGCNMFSYDFNVEETYPGKLLLSIMDKITSTLPDVNKNSITIGANQYEVRINSEGRKELLAHSGKWINKEEAIMSDLSSKEYIFFDSIDNKLKAKSKNIPGLASISEDIKTLLLDASVSPDTKFILNNLKLNIESSIGDYIYYEKLEPVKNIIHNSIDDLIDEFNLLENVSDELYELKKLNNLDEKYLISFEDISKNNSTYSVRFINKSNGESVYVETEKEIFSKYSEHITKEISTIKNSIITDVNGNLLDNIQLDHTSQVNTLNAAFFIQSLIDYSSNKDVLNDLSTSVKVQLYAQLFSTGLNTIYDSIQLVNLISNAVNDTINVLPTITEGIPIVSTILDGINLGAAIKELLDEHDPLLKKELEAKVGVLAINMSLSIAATVASIVGIGAEVTIFLLPIAGISAGIPSLVNNELILHDKATSVVNYFNHLSESKKYGPLKTEDDKILVPIDDLVISEIDFNNNSIKLGTCNILAMEGGSGHTVTGNIDHFFSSPSISSHIPSLSIYSAIGIETENLDFSKKIMMLPNAPSRVFWWETGAVPGLRSLENDGTRLLDSIRDLYPGKFYWRFYAFFDYAITTLKPVYEDTNIKIKLDKDTRNFIMPTITTNEIRNKLSYSFDGAGGTYSLLLSSYPISTNINLSKDDLWIFNIDNEVREISIENGTIKKGKLIKDVLSKIDINKNKLIIGNQTIDFSGDIDNKDRYIFLTCELDDKISLIIEINLVAKSYSLLLSGDKNYLISNLSNTIEKINTLGLDSKNIAYNYTDESNNKYFGAISKTSQKSIIHYKKDSKNILEFYNDSTLEFNSKDFIAEDINVFMKDDINTITGKYYVDNNTDKSIDFSISLVSKNQVKVNGLYLNESVYSSYLDFVKNSDGHHNTSNFMNLFLDNISFWKLFGFENINFVIDKYFTLVGKTNLGYVEFICDNNKNIDIYFGEWKTSSSKSTIFSGNGRNVVVEPIYNPDTGEDISTSLDFSYEPLYGIDRYINKVLIAPDLYTSLININTNYYSNEYYPEIIVLNPNTFHKKVNINLDSSSFEYKWSTEGSDFILVRYLEESNKKILQKIRIKGILSNTQSFNKMSIDFKDIKKLSLGYIMSNFKSFNSENELDRDHLGFKIIDNKTYYYDEDSKLVKGLININNSLFYFDPIEFNLVTGWQTINGKKYYFDINTGAALTSYKIINGKHFYFNNDGVMQLGVFKGPDGFEYFAPANTQNNNIEGQAIVYQSKFLTLNGKKYYFDNNSKAVTGWRIINNEKYYFNPNNAIAAVGLQVIDNNKYYFNPDTAIISKGWQTVNGSRYYFDTDTAIAFNGYKTIDGKHFYFDSDCVVKIGVFSTSNGFEYFAPANTYNNNIEGQAIVYQSKFLTLNGKKYYFDNNSKAVTGLQTIDSKKYYFNTNTAEAATGWQTIDGKKYYFNTNTAEAATGWQTIDGKKYYFNTNTAIASTGYTIINGKHFYFNTDGIMQIGVFKGPNGFEYFAPANTDANNIEGQAILYQNEFLTLNGKKYYFGSDSKAVTGWRIINNKKYYFNPNNAIAAIHLCTINNDKYYFSYDGILQNGYITIERNNFYFDANNESKMVTGVFKGPNGFEYFAPANTHNNNIEGQAIVYQNKFLTLNGKKYYFDNDSKAVTGWQTIDGKKYYFNLNTAEAATGWQTIDGKKYYFNLNTAEAATGWQTIDGKKYYFNTNTFIASTGYTSINGKHFYFNTDGIMQIGVFKGPNGFEYFAPANTDANNIEGQAILYQNKFLTLNGKKYYFGSDSKAVTGLRTIDGKKYYFNTNTAVAVTGWQTINGKKYYFNTNTSIASTGYTIISGKHFYFNTDGIMQIGVFKGPDGFEYFAPANTDANNIEGQAIRYQNRFLYLHDNIYYFGNNSKAATGWVTIDGNRYYFEPNTAMGANGYKTIDNKNFYFRNGLPQIGVFKGSNGFEYFAPANTDANNIEGQAIRYQNRFLHLLGKIYYFGNNSKAVTGWQTINGKVYYFMPDTAMAAAGGLFEIDGVIYFFGVDGVKAPGIYG

SEQ ID NO: 209 - protein, 2709 aa, synthetic construct
  REGION 1..2709: note = Synthetic amino acid sequence
SLISKEELIKLAYSIRPRENEYKTILTNLDEYNKLTTNNNENKYLQLKKLNESIDVFMNKYKNSSRNRALSNLKKDILKEVILIKNSNTSPVEKNLHFVAIGGEVSDIALEYIKQWADINAEYNIKLWYDSEAFLVNTLKKAIVESSTTEALQLLEEEIQNPQFDNMKFYKKRMEFIYDRQKRFINYYKSQINKPTVPTIDDIIKSHLVSEYNRDETLLESYRTNSLRKINSNHGIDIRANSLFTEQELLNIYSQELLNRGNLAAASDIVRLLALKNFGGVYLDVAMLPGIHSDLFKTIPRPSSIGLDRWEMIKLEAIMKYKKYINNYTSENFDKLDQQLKDNFKLIIESKSEKSEIFSKLENLNVSDLEIKIAFALGSVINQALISKQGSYLTNLVIEQVKNRYQFLNQHLNPAIESDNNFTDTTKIFHDSLFNSATAENSMFLTKIAPYLQVGFMPEARSTISLSGPGAYASAYYDFINLQENTIEKTLKASDLIEFKFPENNLSQLTEQQINSLWSFDQASAKYQFEKYVRDYTGGSLSEDNGVDFNKNTALDKNYLLNNKIPSNNVEEAGSKNYVHYIIQLQGDDISYEATCNLFSKNPKNSIIIQRNMNESAKSYFLSDDGESILELNKYRIPERLKNKEKVKVTFIGHGKDEFNTSEFARLSVDSLSNEISSFLDTIKLDISPKNVEVNLLGCNMFSYDFNVEETYPGKLLLSIMDKITSTLPDVNKDSITIGANQYEVRINSEGRKELLAHSGKWINKEEAIMSDLSSKEYIFFDSIDNKLKAKSKNIPGLASISEDIKTLLLDASVSPDTKFILNNLKLNIESSIGDYIYYEKLEPVKNIIHNSIDDLIDEFNLLENVSDELYELKKLNNLDEKYLISFEDISKNNSTYSVRFINKSNGESVYVETEKEIFSKYSEHITKEISTIKNSIITDVNGNLLDNIQLDHTSQVNTLNAAFFIQSLIDYSSNKDVLNDLSTSVKVQLYAQLFSTGLNTIYDSIQLVNLISNAVNDTINVLPTITEGIPIVSTILDGINLGAAIKELLDEHDPLLKKELEAKVGVLAINMSLSIAATVASIVGIGAEVTIFLLPIAGISAGIPSLVNNELILHDKATSVVNYFNHLSESKEYGPLKTEDDKILVPIDDLVISEIDFNNNSIKLGTCNILAMEGGSGHTVTGNIDHFFSSPYISSHIPSLSVYSAIGIKTENLDFSKKIMMLPNAPSRVFWWETGAVPGLRSLENNGTKLLDSIRDLYPGKFYWRFYAFFDYAITTLKPVYEDTNTKIKLDKDTRNFIMPTITTDEIRNKLSYSFDGAGGTYSLLLSSYPISMNINLSKDDLWIFNIDNEVREISIENGTIKKGNLIEDVLSKIDINKNKLIIGNQTIDFSGDIDNKDRYIFLTCELDDKISLIIEINLVAKSYSLLLSGDKNYLISNLSNTIEKINTLGLDSKNIAYNYTDESNNKYFGAISKTSQKSIIHYKKDSKNILEFYNGSTLEFNSKDFIAEDINVFMKDDINTITGKYYVDNNTDKSIDFSISLVSKNQVKVNGLYLNESVYSSYLDFVKNSDGHHNTSNFMNLFLNNISFWKLFGFENINFVIDKYFTLVGKTNLGYVEFICDNNKNIDIYFGEWKTSSSKSTIFSGNGRNVVVEPIYNPDTGEDISTSLDFSYEPLYGIDRYINKVLIAPDLYTSLININTNYYSNEYYPEIIVLNPNTFHKKVNINLDSSSFEYKWSTEGSDFILVRYLEESNKKILQKIRIKGILSNTQSFNKMSIDFKDIKKLSLGYIMSNFKSFNSENELDRDHLGFKIIDNKTYYYDEDSKLVKGLININNSLFYFDPIESNLVTGWQTINGKKYYFDINTGAASTSYKIINGKHFYFNNNGVMQLGVFKGPDGFEYFAPANTQNNNIEGQAIVYQSKFLTLNGKKYYFDNDSKAVTGWRIINNEKYYFNPNNAIAAVGLQVIDNNKYYFNPDTAIISKGWQTVNGSRYYFDTDTAIAFNGYKTIDGKHFYFDSDCVVKIGVFSGSNGFEYFAPANTYNNNIEGQAIVYQSKFLTLNGKKYYFDNNSKAVTGWQTIDSKKYYFNTNTAEAATGWQTIDGKKYYFNTNTAEAATGWQTIDGKKYYFNTNTSIASTGYTIINGKYFYFNTDGIMQIGVFKVPNGFEYFAPANTHNNNIEGQAILYQNKFLTLNGKKYYFGSDSKAITGWQTIDGKKYYFNPNNAIAATHLCTINNDKYYFSYDGILQNGYITIERNNFYFDANNESKMVTGVFKGPNGFEYFAPANTHNNNIEGQAIVYQNKFLTLNGKKYYFDNDSKAVTGWQTIDSKKYYFNLNTAVAVTGWQTIDGEKYYFNLNTAEAATGWQTIDGKRYYFNTNTYIASTGYTIINGKHFYFNTDGIMQIGVFKGPDGFEYFAPANTHNNNIEGQAILYQNKFLTLNGKKYYFGSDSKAVTGLRTIDGKKYYFNTNTAVAVTGWQTINGKKYYFNTNTYIASTGYTIISGKHFYFNTDGIMQIGVFKGPDGFEYFAPANTDANNIEGQAIRYQNRFLYLHDNIYYFGNDSKAATGWATIDGNRYYFEPNTAMGANGYKTIDNKNFYFRNGLPQIGVFKGPNGFEYFAPANTDANNIDGQAIRYQNRFLHLLGKIYYFGNNSKAVTGWQTINSKVYYFMPDTAMAAAGGLFEIDGVIYFFGVDGVKAPGIYG

SEQ ID NO: 210 - protein, 2709 aa, synthetic construct
  REGION 1..2709: note = Synthetic amino acid sequence
SLISKEELIKLAYSIRPRENEYKTILTNLDEYNKLTTNNNENKYLQLKKLNESIDVFMNKYKTSSRNRALSNLKKDILKEVILIKNSNTSPVEKNLHFVAIGGEVSDIALEYIKQWADINAEYNIKLWYDSEAFLVNTLKKAIVESSTTEALQLLEEEIQNPQFDNMKFYKKRMEFIYDRQKRFINYYKSQINKPTVPTIDDIIKSHLVSEYNRDETVLESYRTNSLRKINSNHGIDIRANSLFTEQELLNIYSQELLNRGNLAAASDIVRLLALKNFGGVYLDVAMLPGIHSDLFKTISRPSSIGLDRWEMIKLEAIMKYKKYINNYTSENFDKLDQQLKDNFKLIIESKSEKSEIFSKLENLNVSDLEIKIAFALGSVINQALISKQGSYLTNLVIEQVKNRYQFLNQHLNPAIESDNNFTDTTKIFHDSLFNSATAENSMFLTKIAPYLQVGFMPEARSTISLSGPGAYASAYYDFINLQENTIEKTLKASDLIEFKFPENNLSQLTEQQINSLASFDQASAKYQFEKYVRDYTGGSLSEDNGVDFNKNTALDKNYLLNNKIPSNNVEEAGSKNYVHYIIQLQGDDISYEATCNLFSKNPKNSIIIQRNMNESAKSYFLSDDGESILELNKYRIPERLKNKEKVKVTFIGHGKDEFNTSEFARLSVDSLSNEISSFLDTIKLDISPKNVEVNLLGANMFSYDFNVEETYPGKLLLSIMDKITSTLPDVNKNSITIGANQYEVRINSEGRKELLAHSGKWINKEEAIMSDLSSKEYIFFDSIDNKLKAKSKNIPGLASISEDIKTLLLDASVSPDTKFILNNLKLNIESSIGDYIYYEKLEPVKNIIHNSIDDLIDEFNLLENVSDELYELKKLNNLDEKYLISFEDISKNNSTYSVRFINKSNGESVYVETEKEIFSKYSEHITKEISTIKNSIITDVNGNLLDNIQLDHTSQVNTLNAAFFIQSLIDYSSNKDVLNDLSTSVKVQLYAQLFSTGLNTIYDSIQLVNLISNAVNDTINVLPTITEGIPIVSTILDGINLGAAIKELLDEHDPLLKKELEAKVGVLAINMSLSIAATVASIVGIGAEVTIFLLPIAGISAGIPSLVNNELILHDKATSVVNYFNHLSESKKYGPLKTEDDKILVPIDDLVISEIDFNNNSIKLGTCNILAMEGGSGHTVTGNIDHFFSSPSISSHIPSLSIYSAIGIETENLDFSKKIMMLPNAPSRVFWWETGAVPGLRSLENDGTRLLDSIRDLYPGKFYWRFYAFFDYAITTLKPVYEDTNIKIKLDKDTRNFIMPTITTNEIRNKLSYSFDGAGGTYSLLLSSYPISTNINLSKDDLWIFNIDNEVREISIENGTIKKGKLIKDVLSKIDINKNKLIIGNQTIDFSGDIDNKDRYIFLTCELDDKISLIIEINLVAKSYSLLLSGDKNYLISNLSNTIEKINTLGLDSKNIAYNYTDESNNKYFGAISKTSQKSIIHYKKDSKNILEFYNDSTLEFNSKDFIAEDINVFMKDDINTITGKYYVDNNTDKSIDFSISLVSKNQVKVNGLYLNESVYSSYLDFVKNSDGHHNTSNFMNLFLDNISFWKLFGFENINFVIDKYFTLVGKTNLGYVEFICDNNKNIDIYFGEWKTSSSKSTIFSGNGRNVVVEPIYNPDTGEDISTSLDFSYEPLYGIDRYINKVLIAPDLYTSLININTNYYSNEYYPEIIVLNPNTFHKKVNINLDSSSFEYKWSTEGSDFILVRYLEESNKKILQKIRIKGILSNTQSFNKMSIDFKDIKKLSLGYIMSNFKSFNSENELDRDHLGFKIIDNKTYYYDEDSKLVKGLININNSLFYFDPIEFNLVTGWQTINGKKYYFDINTGAALTSYKIINGKHFYFNNDGVMQLGVFKGPDGFEYFAPANTQNNNIEGQAIVYQSKFLTLNGKKYYFDNNSKAVTGWRIINNEKYYFNPNNAIAAVGLQVIDNNKYYFNPDTAIISKGWQTVNGSRYYFDTDTAIAFNGYKTIDGKHFYFDSDCVVKIGVFSTSNGFEYFAPANTYNNNIEGQAIVYQSKFLTLNGKKYYFDNNSKAVTGLQTIDSKKYYFNTNTAEAATGWQTIDGKKYYFNTNTAEAATGWQTIDGKKYYFNTNTAIASTGYTIINGKHFYFNTDGIMQIGVFKGPNGFEYFAPANTDANNIEGQAILYQNEFLTLNGKKYYFGSDSKAVTGWRIINNKKYYFNPNNAIAAIHLCTINNDKYYFSYDGILQNGYITIERNNFYFDANNESKMVTGVFKGPNGFEYFAPANTHNNNIEGQAIVYQNKFLTLNGKKYYFDNDSKAVTGWQTIDGKKYYFNLNTAEAATGWQTIDGKKYYFNLNTAEAATGWQTIDGKKYYFNTNTFIASTGYTSINGKHFYFNTDGIMQIGVFKGPNGFEYFAPANTDANNIEGQAILYQNKFLTLNGKKYYFGSDSKAVTGLRTIDGKKYYFNTNTAVAVTGWQTINGKKYYFNTNTSIASTGYTIISGKHFYFNTDGIMQIGVFKGPDGFEYFAPANTDANNIEGQAIRYQNRFLYLHDNIYYFGNNSKAATGWVTIDGNRYYFEPNTAMGANGYKTIDNKNFYFRNGLPQIGVFKGSNGFEYFAPANTDANNIEGQAIRYQNRFLHLLGKIYYFGNNSKAVTGWQTINGKVYYFMPDTAMAAAGGLFEIDGVIYFFGVDGVKAPGIYG

SEQ ID NO: 211 - protein, 718 aa, synthetic construct
  REGION 1..718: note = Synthetic amino acid sequence
SLISKEELIKLAYSIRPRENEYKTILTNLDEYNKLTTNNNENKYLQLKKLNESIDVFMNKYKTSSRNRALSNLKKDILKEVILIKNSNTSPVEKNLHFVWIGGEVSDIALEYIKQWADINAEYNIKLWYDSEAFLVNTLKKAIVESSTTEALQLLEEEIQNPQFDNMKFYKKRMEFIYDRQKRFINYYKSQINKPTVPTIDDIIKSHLVSEYNRDETVLESYRTNSLRKINSNHGIDIRANSLFTEQELLNIYSQELLNRGNLAAASDIVRLLALKNFGGVYLDVDMLPGIHSDLFKTISRPSSIGLDRWEMIKLEAIMKYKKYINNYTSENFDKLDQQLKDNFKLIIESKSEKSEIFSKLENLNVSDLEIKIAFALGSVINQALISKQGSYLTNLVIEQVKNRYQFLNQHLNPAIESDNNFTDTTKIFHDSLFNSATAENSMFLTKIAPYLQVGFMPEARSTISLSGPGAYASAYYDFINLQENTIEKTLKASDLIEFKFPENNLSQLTEQEINSLWSFDQASAKYQFEKYVRDYTGGSLSEDNGVDFNKNTALDKNYLLNNKIPSNNVEEAGSKNYVHYIIQLQGDDISYEATCNLFSKNPKNSIIIQRNMNESAKSYFLSDDGESILELNKYRIPERLKNKEKVKVTFIGHGKDEFNTSEFARLSVDSLSNEISSFLDTIKLDISPKNVEVNLLGCNMFSYDFNVEETYPGKLLL

SEQ ID NO: 212 - protein, 2709 aa, synthetic construct
  REGION 1..2709: note = Synthetic amino acid sequence
  SITE 100: note = misc_feature - Xaa can be any naturally occurring amino acid
  VARIANT 101: note = Xaa is any amino acid, but not Trp
  VARIANT 286: note = Xaa is any amino acid, but not Asp
  VARIANT 513: note = Xaa is any amino acid, but not Glu
  VARIANT 518: note = Xaa is any amino acid, but not Trp
  VARIANT 699: note = Xaa is any amino acid, but not Cys
SLISKEELIKLAYSIRPRENEYKTILTNLDEYNKLTTNNNENKYLQLKKLNESIDVFMNKYKTSSRNRALSNLKKDILKEVILIKNSNTSPVEKNLHFVXIGGEVSDIALEYIKQWADINAEYNIKLWYDSEAFLVNTLKKAIVESSTTEALQLLEEEIQNPQFDNMKFYKKRMEFIYDRQKRFINYYKSQINKPTVPTIDDIIKSHLVSEYNRDETVLESYRTNSLRKINSNHGIDIRANSLFTEQELLNIYSQELLNRGNLAAASDIVRLLALKNFGGVYLDVXMLPGIHSDLFKTISRPSSIGLDRWEMIKLEAIMKYKKYINNYTSENFDKLDQQLKDNFKLIIESKSEKSEIFSKLENLNVSDLEIKIAFALGSVINQALISKQGSYLTNLVIEQVKNRYQFLNQHLNPAIESDNNFTDTTKIFHDSLFNSATAENSMFLTKIAPYLQVGFMPEARSTISLSGPGAYASAYYDFINLQENTIEKTLKASDLIEFKFPENNLSQLTEQXINSLXSFDQASAKYQFEKYVRDYTGGSLSEDNGVDFNKNTALDKNYLLNNKIPSNNVEEAGSKNYVHYIIQLQGDDISYEATCNLFSKNPKNSIIIQRNMNESAKSYFLSDDGESILELNKYRIPERLKNKEKVKVTFIGHGKDEFNTSEFARLSVDSLSNEISSFLDTIKLDISPKNVEVNLLGXNMFSYDFNVEETYPGKLLLSIMDKITSTLPDVNKNSITIGANQYEVRINSEGRKELLAHSGKWINKEEAIMSDLSSKEYIFFDSIDNKLKAKSKNIPGLASISEDIKTLLLDASVSPDTKFILNNLKLNIESSIGDYIYYEKLEPVKNIIHNSIDDLIDEFNLLENVSDELYELKKLNNLDEKYLISFEDISKNNSTYSVRFINKSNGESVYVETEKEIFSKYSEHITKEISTIKNSIITDVNGNLLDNIQLDHTSQVNTLNAAFFIQSLIDYSSNKDVLNDLSTSVKVQLYAQLFSTGLNTIYDSIQLVNLISNAVNDTINVLPTITEGIPIVSTILDGINLGAAIKELLDEHDPLLKKELEAKVGVLAINMSLSIAATVASIVGIGAEVTIFLLPIAGISAGIPSLVNNELILHDKATSVVNYFNHLSESKKYGPLKTEDDKILVPIDDLVISEIDFNNNSIKLGTCNILAMEGGSGHTVTGNIDHFFSSPSISSHIPSLSIYSAIGIETENLDFSKKIMMLPNAPSRVFWWETGAVPGLRSLENDGTRLLDSIRDLYPGKFYWRFYAFFDYAITTLKPVYEDTNIKIKLDKDTRNFIMPTITTNEIRNKLSYSFDGAGGTYSLLLSSYPISTNINLSKDDLWIFNIDNEVREISIENGTIKKGKLIKDVLSKIDINKNKLIIGNQTIDFSGDIDNKDRYIFLTCELDDKISLIIEINLVAKSYSLLLSGDKNYLISNLSNTIEKINTLGLDSKNIAYNYTDESNNKYFGAISKTSQKSIIHYKKDSKNILEFYNDSTLEFNSKDFIAEDINVFMKDDINTITGKYYVDNNTDKSIDFSISLVSKNQVKVNGLYLNESVYSSYLDFVKNSDGHHNTSNFMNLFLDNISFWKLFGFENINFVIDKYFTLVGKTNLGYVEFICDNNKNIDIYFGEWKTSSSKSTIFSGNGRNVVVEPIYNPDTGEDISTSLDFSYEPLYGIDRYINKVLIAPDLYTSLININTNYYSNEYYPEIIVLNPNTFHKKVNINLDSSSFEYKWSTEGSDFILVRYLEESNKKILQKIRIKGILSNTQSFNKMSIDFKDIKKLSLGYIMSNFKSFNSENELDRDHLGFKIIDNKTYYYDEDSKLVKGLININNSLFYFDPIEFNLVTGWQTINGKKYYFDINTGAALTSYKIINGKHFYFNNDGVMQLGVFKGPDGFEYFAPANTQNNNIEGQAIVYQSKFLTLNGKKYYFDNNSKAVTGWRIINNEKYYFNPNNAIAAVGLQVIDNNKYYFNPDTAIISKGWQTVNGSRYYFDTDTAIAFNGYKTIDGKHFYFDSDCVVKIGVFSTSNGFEYFAPANTYNNNIEGQAIVYQSKFLTLNGKKYYFDNNSKAVTGLQTIDSKKYYFNTNTAEAATGWQTIDGKKYYFNTNTAEAATGWQTIDGKKYYFNTNTAIASTGYTIINGKHFYFNTDGIMQIGVFKGPNGFEYFAPANTDANNIEGQAILYQNEFLTLNGKKYYFGSDSKAVTGWRIINNKKYYFNPNNAIAAIHLCTINNDKYYFSYDGILQNGYITIERNNFYFDANNESKMVTGVFKGPNGFEYFAPANTHNNNIEGQAIVYQNKFLTLNGKKYYFDNDSKAVTGWQTIDGKKYYFNLNTAEAATGWQTIDGKKYYFNLNTAEAATGWQTIDGKKYYFNTNTFIASTGYTSINGKHFYFNTDGIMQIGVFKGPNGFEYFAPANTDANNIEGQAILYQNKFLTLNGKKYYFGSDSKAVTGLRTIDGKKYYFNTNTAVAVTGWQTINGKKYYFNTNTSIASTGYTIISGKHFYFNTDGIMQIGVFKGPDGFEYFAPANTDANNIEGQAIRYQNRFLYLHDNIYYFGNNSKAATGWVTIDGNRYYFEPNTAMGANGYKTIDNKNFYFRNGLPQIGVFKGSNGFEYFAPANTDANNIEGQAIRYQNRFLHLLGKIYYFGNNSKAVTGWQTINGKVYYFMPDTAMAAAGGLFEIDGVIYFFGVDGVKAPGIYG

SEQ ID NO: 213 - protein, 2366 aa, synthetic construct
  REGION 1..2366: note = Synthetic amino acid sequence
GSLVNRKQLEKMANVRFRTQEDEYVAILDALEEYHNMSENTVVEKYLKLKDINSLTDIYIDTYKKSGRNKALKKFKEYLVTEVLELKNNNLTPVEKNLHFVAIGGQINDTAINYINQWKDVNSDYNVNVFYDSNAFLINTLKKTVVESAINDTLESFRENLNDPRFDYNKFFRKRMEIIYDKQKNFINYYKAQREENPELIIDDIVKTYLSNEYSKEIDELNTYIEESLNKITQNSGNDVRNFEEFKNGESFNLYEQELVERWNLAAASDILRISALKEIGGMYLDVAMLPGIQPDLFESIEKPSSVTVDFWEMTKLEAIMKYKEYIPEYTSEHFDMLDEEVQSSFESVLASKSDKSEIFSSLGDMEASPLEVKIAFNSKGIINQGLISVKDSYCSNLIVKQIENRYKILNNSLNPAISEDNDFNTTTNTFIDSIMAEANADNGRFMMELGKYLRVGFFPDVKTTINLSGPEAYAAAYQDLLMFKEGSMNIHLIEADLRNFEISKTNISQSTEQQMASLWSFDDARAKAQFEEYKRNYFEGSLGEDDNLDFSQNIVVDKEYLLEKISSLARSSERGYIHYIVQLQGDKISYEAACNLFAKTPYDSVLFQKNIEDSEIAYYYNPGDGEIQEIDKYKIPSIISDRPKIKLTFIGHGKDEFNTDIFAGFDVDSLSTEIEAAIDLAKEDISPKSIEINLLGCNMFSYSINVEETYPGKLLLKVKDKISELMPSISQDSIIVSANQYEVRINSEGRRELLDHSGEWINKEESIIKDISSKEYISFNPKENKITVKSKNLPELSTLLQEIRNNSNSSDIELEEKVMLTECEINVISNIDTQIVEERIEEAKNLTSDSINYIKDEFKLIESISDALCDLKQQNELEDSHFISFEDISETDEGFSIRFINKETGESIFVETEKTIFSEYANHITEEISKIKGTIFDTVNGKLVKKVNLDTTHEVNTLNAAFFIQSLIEYNSSKESLSNLSVAMKVQVYAQLFSTGLNTITDAAKVVELVSTALDETIDLLPTLSEGLPIIATIIDGVSLGAAIKELSETSDPLLRQEIEAKIGIMAVNLTTATTAIITSSLGIASGFSILLVPLAGISAGIPSLVNNELVLRDKATKVVDYFKHVSLVETEGVFTLLDDKIMMPQDDLVISEIDFNNNSIVLGKCEIWRMEGGSGHTVTDDIDHFFSAPSITYREPHLSIYDVLEVQKEELDLSKDLMVLPNAPNRVFAWETGWTPGLRSLENDGTKLLDRIRDNYEGEFYWRYFAFIADALITTLKPRYEDTNIRINLDSNTRSFIVPIITTEYIREKLSYSFYGSGGTYALSLSQYNMGINIELSESDVWIIDVDNVVRDVTIESDKIKKGDLIEGILSTLSIEENKIILNSHEINFSGEVNGSNGFVSLTFSILEGINAIIEVDLLSKSYKLLISGELKILMLNSNHIQQKIDYIGFNSELQKNIPYSFVDSEGKENGFINGSTKEGLFVSELPDVVLISKVYMDDSKPSFGYYSNNLKDVKVITKDNVNILTGYYLKDDIKISLSLTLQDEKTIKLNSVHLDESGVAEILKFMNRKGNTNTSDSLMSFLESMNIKSIFVNFLQSNIKFILDANFIISGTTSIGQFEFICDENDNIQPYFIKFNTLETNYTLYVGNRQNMIVEPNYDLDDSGDISSTVINFSQKYLYGIDSCVNKVVISPNIYTDEINITPVYETNNTYPEVIVLDANYINEKINVNINDLSIRYVWSNDGNDFILMSTSEENKVSQVKIRFVNVFKDKTLANKLSFNFSDKQDVPVSEIILSFTPSYYEDGLIGYDLGLVSLYNEKFYINNFGMMVSGLIYINDSLYYFKPPVNNLITGFVTVGDDKYYFNPINGGAASIGETIIDDKNYYFNQSGVLQTGVFSTEDGFKYFAPANTLDENLEGEAIDFTGKLIIDENIYYFDDNYRGAVEWKELDGEMHYFSPETGKAFKGLNQIGDYKYYFNSDGVMQKGFVSINDNKHYFDDSGVMKVGYTEIDGKHFYFAENGEMQIGVFNTEDGFKYFAHHNEDLGNEEGEEISYSGILNFNNKIYYFDDSFTAVVGWKDLEDGSKYYFDEDTAEAYIGLSLINDGQYYFNDDGIMQVGFVTINDKVFYFSDSGIIESGVQNIDDNYFYIDDNGIVQIGVFDTSDGYKYFAPANTVNDNIYGQAVEYSGLVRVGEDVYYFGETYTIETGWIYDMENESDKYYFNPETKKACKGINLIDDIKYYFDEKGIMRTGLISFENNNYYFNENGEMQFGYINIEDKMFYFGEDGVMQIGVFNTPDGFKYFAHQNTLDENFEGESINYTGWLDLDEKRYYFTDEYIAATGSVIIDGEEYYFDPDTAQLVISE

SEQ ID NO: 214 - protein, 2365 aa, synthetic construct
  REGION 1..2365: note = Synthetic amino acid sequence
GSLVNRKQLEKMANVRFRTQEDEYVAILDALEEYHNMSENTVVEKYLKLKDINSLTDIYIDTYKKSGRNKALKKFKEYLVTEVLELKNNNLTPVEKNLHFVIGGQINDTAINYINQWKDVNSDYNVNVFYDSNAFLINTLKKTVVESAINDTLESFRENLNDPRFDYNKFFRKRMEIIYDKQKNFINYYKAQREENPELIIDDIVKTYLSNEYSKEIDELNTYIEESLNKITQNSGNDVRNFEEFKNGESFNLYEQELVERWNLAAASDILRISALKEIGGMYLDVDMLPGIQPDLFESIEKPSSVTVDFWEMTKLEAIMKYKEYIPEYTSEHFDMLDEEVQSSFESVLASKSDKSEIFSSLGDMEASPLEVKIAFNSKGIINQGLISVKDSYCSNLIVKQIENRYKILNNSLNPAISEDNDFNTTTNTFIDSIMAEANADNGRFMMELGKYLRVGFFPDVKTTINLSGPEAYAAAYQDLLMFKEGSMNIHLIEADLRNFEISKTNISQSTEQEMASLWSFDDARAKAQFEEYKRNYFEGSLGEDDNLDFSQNIVVDKEYLLEKISSLARSSERGYIHYIVQLQGDKISYEAACNLFAKTPYDSVLFQKNIEDSEIAYYYNPGDGEIQEIDKYKIPSIISDRPKIKLTFIGHGKDEFNTDIFAGFDVDSLSTEIEAAIDLAKEDISPKSIEINLLGCNMFSYSINVEETYPGKLLLKVKDKISELMPSISQDSIIVSANQYEVRINSEGRRELLDHSGEWINKEESIIKDISSKEYISFNPKENKITVKSKNLPELSTLLQEIRNNSNSSDIELEEKVMLTECEINVISNIDTQIVEERIEEAKNLTSDSINYIKDEFKLIESISDALCDLKQQNELEDSHFISFEDISETDEGFSIRFINKETGESIFVETEKTIFSEYANHITEEISKIKGTIFDTVNGKLVKKVNLDTTHEVNTLNAAFFIQSLIEYNSSKESLSNLSVAMKVQVYAQLFSTGLNTITDAAKVVELVSTALDETIDLLPTLSEGLPIIATIIDGVSLGAAIKELSETSDPLLRQEIEAKIGIMAVNLTTATTAIITSSLGIASGFSILLVPLAGISAGIPSLVNNELVLRDKATKVVDYFKHVSLVETEGVFTLLDDKIMMPQDDLVISEIDFNNNSIVLGKCEIWRMEGGSGHTVTDDIDHFFSAPSITYREPHLSIYDVLEVQKEELDLSKDLMVLPNAPNRVFAWETGWTPGLRSLENDGTKLLDRIRDNYEGEFYWRYFAFIADALITTLKPRYEDTNIRINLDSNTRSFIVPIITTEYIREKLSYSFYGSGGTYALSLSQYNMGINIELSESDVWIIDVDNVVRDVTIESDKIKKGDLIEGILSTLSIEENKIILNSHEINFSGEVNGSNGFVSLTFSILEGINAIIEVDLLSKSYKLLISGELKILMLNSNHIQQKIDYIGFNSELQKNIPYSFVDSEGKENGFINGSTKEGLFVSELPDVVLISKVYMDDSKPSFGYYSNNLKDVKVITKDNVNILTGYYLKDDIKISLSLTLQDEKTIKLNSVHLDESGVAEILKFMNRKGNTNTSDSLMSFLESMNIKSIFVNFLQSNIKFILDANFIISGTTSIGQFEFICDENDNIQPYFIKFNTLETNYTLYVGNRQNMIVEPNYDLDDSGDISSTVINFSQKYLYGIDSCVNKVVISPNIYTDEINITPVYETNNTYPEVIVLDANYINEKINVNINDLSIRYVWSNDGNDFILMSTSEENKVSQVKIRFVNVFKDKTLANKLSFNFSDKQDVPVSEIILSFTPSYYEDGLIGYDLGLVSLYNEKFYINNFGMMVSGLIYINDSLYYFKPPVNNLITGFVTVGDDKYYFNPINGGAASIGETIIDDKNYYFNQSGVLQTGVFSTEDGFKYFAPANTLDENLEGEAIDFTGKLIIDENIYYFDDNYRGAVEWKELDGEMHYFSPETGKAFKGLNQIGDYKYYFNSDGVMQKGFVSINDNKHYFDDSGVMKVGYTEIDGKHFYFAENGEMQIGVFNTEDGFKYFAHHNEDLGNEEGEEISYSGILNFNNKIYYFDDSFTAVVGWKDLEDGSKYYFDEDTAEAYIGLSLINDGQYYFNDDGIMQVGFVTINDKVFYFSDSGIIESGVQNIDDNYFYIDDNGIVQIGVFDTSDGYKYFAPANTVNDNIYGQAVEYSGLVRVGEDVYYFGETYTIETGWIYDMENESDKYYFNPETKKACKGINLIDDIKYYFDEKGIMRTGLISFENNNYYFNENGEMQFGYINIEDKMFYFGEDGVMQIGVFNTPDGFKYFAHQNTLDENFEGESINYTGWLDLDEKRYYFTDEYIAATGSVIIDGEEYYFDPDTAQLVISE

SEQ ID NO: 215 - protein, 2365 aa, synthetic construct
  REGION 1..2365: note = Synthetic amino acid sequence
SLVNRKQLEKMANVRFRTQEDEYVAILDALEEYHNMSENTVVEKYLKLKDINSLTDIYIDTYKKSGRNKALKKFKEYLVTEVLELKNNNLTPVEKNLHFVAIGGQINDTAINYINQWKDVNSDYNVNVFYDSNAFLINTLKKTVVESAINDTLESFRENLNDPRFDYNKFFRKRMEIIYDKQKNFINYYKAQREENPELIIDDIVKTYLSNEYSKEIDELNTYIEESLNKITQNSGNDVRNFEEFKNGESFNLYEQELVERWNLAAASDILRISALKEIGGMYLDVAMLPGIQPDLFESIEKPSSVTVDFWEMTKLEAIMKYKEYIPEYTSEHFDMLDEEVQSSFESVLASKSDKSEIFSSLGDMEASPLEVKIAFNSKGIINQGLISVKDSYCSNLIVKQIENRYKILNNSLNPAISEDNDFNTTTNTFIDSIMAEANADNGRFMMELGKYLRVGFFPDVKTTINLSGPEAYAAAYQDLLMFKEGSMNIHLIEADLRNFEISKTNISQSTEQQMASLWSFDDARAKAQFEEYKRNYFEGSLGEDDNLDFSQNIVVDKEYLLEKISSLARSSERGYIHYIVQLQGDKISYEAACNLFAKTPYDSVLFQKNIEDSEIAYYYNPGDGEIQEIDKYKIPSIISDRPKIKLTFIGHGKDEFNTDIFAGFDVDSLSTEIEAAIDLAKEDISPKSIEINLLGCNMFSYSINVEETYPGKLLLKVKDKISELMPSISQDSIIVSANQYEVRINSEGRRELLDHSGEWINKEESIIKDISSKEYISFNPKENKITVKSKNLPELSTLLQEIRNNSNSSDIELEEKVMLTECEINVISNIDTQIVEERIEEAKNLTSDSINYIKDEFKLIESISDALCDLKQQNELEDSHFISFEDISETDEGFSIRFINKETGESIFVETEKTIFSEYANHITEEISKIKGTIFDTVNGKLVKKVNLDTTHEVNTLNAAFFIQSLIEYNSSKESLSNLSVAMKVQVYAQLFSTGLNTITDAAKVVELVSTALDETIDLLPTLSEGLPIIATIIDGVSLGAAIKELSETSDPLLRQEIEAKIGIMAVNLTTATTAIITSSLGIASGFSILLVPLAGISAGIPSLVNNELVLRDKATKVVDYFKHVSLVETEGVFTLLDDKIMMPQDDLVISEIDFNNNSIVLGKCEIWRMEGGSGHTVTDDIDHFFSAPSITYREPHLSIYDVLEVQKEELDLSKDLMVLPNAPNRVFAWETGWTPGLRSLENDGTKLLDRIRDNYEGEFYWRYFAFIADALITTLKPRYEDTNIRINLDSNTRSFIVPIITTEYIREKLSYSFYGSGGTYALSLSQYNMGINIELSESDVWIIDVDNVVRDVTIESDKIKKGDLIEGILSTLSIEENKIILNSHEINFSGEVNGSNGFVSLTFSILEGINAIIEVDLLSKSYKLLISGELKILMLNSNHIQQKIDYIGFNSELQKNIPYSFVDSEGKENGFINGSTKEGLFVSELPDVVLISKVYMDDSKPSFGYYSNNLKDVKVITKDNVNILTGYYLKDDIKISLSLTLQDEKTIKLNSVHLDESGVAEILKFMNRKGNTNTSDSLMSFLESMNIKSIFVNFLQSNIKFILDANFIISGTTSIGQFEFICDENDNIQPYFIKFNTLETNYTLYVGNRQNMIVEPNYDLDDSGDISSTVINFSQKYLYGIDSCVNKVVISPNIYTDEINITPVYETNNTYPEVIVLDANYINEKINVNINDLSIRYVWSNDGNDFILMSTSEENKVSQVKIRFVNVFKDKTLANKLSFNFSDKQDVPVSEIILSFTPSYYEDGLIGYDLGLVSLYNEKFYINNFGMMVSGLIYINDSLYYFKPPVNNLITGFVTVGDDKYYFNPINGGAASIGETIIDDKNYYFNQSGVLQTGVFSTEDGFKYFAPANTLDENLEGEAIDFTGKLIIDENIYYFDDNYRGAVEWKELDGEMHYFSPETGKAFKGLNQIGDYKYYFNSDGVMQKGFVSINDNKHYFDDSGVMKVGYTEIDGKHFYFAENGEMQIGVFNTEDGFKYFAHHNEDLGNEEGEEISYSGILNFNNKIYYFDDSFTAVVGWKDLEDGSKYYFDEDTAEAYIGLSLINDGQYYFNDDGIMQVGFVTINDKVFYFSDSGIIESGVQNIDDNYFYIDDNGIVQIGVFDTSDGYKYFAPANTVNDNIYGQAVEYSGLVRVGEDVYYFGETYTIETGWIYDMENESDKYYFNPETKKACKGINLIDDIKYYFDEKGIMRTGLISFENNNYYFNENGEMQFGYINIEDKMFYFGEDGVMQIGVFNTPDGFKYFAHQNTLDENFEGESINYTGWLDLDEKRYYFTDEYIAATGSVIIDGEEYYFDPDTAQLVISE

SEQ ID NO: 216 - protein, 2365 aa, synthetic construct
  REGION 1..2365: note = Synthetic amino acid sequence
SLVNRKQLEKMANVRFRTQEDEYVAILDALEEYHNMSENTVVEKYLKLKDINSLTDIYIDTYKKSGRNKALKKFKEYLVTEVLELKNNNLTPVEKNLHFVAIGGQINDTAINYINQWKDVNSDYNVNVFYDSNAFLINTLKKTVVESAINDTLESFRENLNDPRFDYNKFFRKRMEIIYDKQKNFINYYKAQREENPELIIDDIVKTYLSNEYSKEIDELNTYIEESLNKITQNSGNDVRNFEEFKNGESFNLYEQELVERWNLAAASDILRISALKEIGGMYLAVAMLPGIQPDLFESIEKPSSVTVDFWEMTKLEAIMKYKEYIPEYTSEHFDMLDEEVQSSFESVLASKSDKSEIFSSLGDMEASPLEVKIAFNSKGIINQGLISVKDSYCSNLIVKQIENRYKILNNSLNPAISEDNDFNTTTNTFIDSIMAEANADNGRFMMELGKYLRVGFFPDVKTTINLSGPEAYAAAYQDLLMFKEGSMNIHLIEADLRNFEISKTNISQSTEQQMASLWSFDDARAKAQFEEYKRNYFEGSLGEDDNLDFSQNIVVDKEYLLEKISSLARSSERGYIHYIVQLQGDKISYEAACNLFAKTPYDSVLFQKNIEDSEIAYYYNPGDGEIQEIDKYKIPSIISDRPKIKLTFIGHGKDEFNTDIFAGFDVDSLSTEIEAAIDLAKEDISPKSIEINLLGCNMFSYSINVEETYPGKLLLKVKDKISELMPSISQDSIIVSANQYEVRINSEGRRELLDHSGEWINKEESIIKDISSKEYISFNPKENKITVKSKNLPELSTLLQEIRNNSNSSDIELEEKVMLTECEINVISNIDTQIVEERIEEAKNLTSDSINYIKDEFKLIESISDALCDLKQQNELEDSHFISFEDISETDEGFSIRFINKETGESIFVETEKTIFSEYANHITEEISKIKGTIFDTVNGKLVKKVNLDTTHEVNTLNAAFFIQSLIEYNSSKESLSNLSVAMKVQVYAQLFSTGLNTITDAAKVVELVSTALDETIDLLPTLSEGLPIIATIIDGVSLGAAIKELSETSDPLLRQEIEAKIGIMAVNLTTATTAIITSSLGIASGFSILLVPLAGISAGIPSLVNNELVLRDKATKVVDYFKHVSLVETEGVFTLLDDKIMMPQDDLVISEIDFNNNSIVLGKCEIWRMEGGSGHTVTDDIDHFFSAPSITYREPHLSIYDVLEVQKEELDLSKDLMVLPNAPNRVFAWETGWTPGLRSLENDGTKLLDRIRDNYEGEFYWRYFAFIADALITTLKPRYEDTNIRINLDSNTRSFIVPIITTEYIREKLSYSFYGSGGTYALSLSQYNMGINIELSESDVWIIDVDNVVRDVTIESDKIKKGDLIEGILSTLSIEENKIILNSHEINFSGEVNGSNGFVSLTFSILEGINAIIEVDLLSKSYKLLISGELKILMLNSNHIQQKIDYIGFNSELQKNIPYSFVDSEGKENGFINGSTKEGLFVSELPDVVLISKVYMDDSKPSFGYYSNNLKDVKVITKDNVNILTGYYLKDDIKISLSLTLQDEKTIKLNSVHLDESGVAEILKFMNRKGNTNTSDSLMSFLESMNIKSIFVNFLQSNIKFILDANFIISGTTSIGQFEFICDENDNIQPYFIKFNTLETNYTLYVGNRQNMIVEPNYDLDDSGDISSTVINFSQKYLYGIDSCVNKVVISPNIYTDEINITPVYETNNTYPEVIVLDANYINEKINVNINDLSIRYVWSNDGNDFILMSTSEENKVSQVKIRFVNVFKDKTLANKLSFNFSDKQDVPVSEIILSFTPSYYEDGLIGYDLGLVSLYNEKFYINNFGMMVSGLIYINDSLYYFKPPVNNLITGFVTVGDDKYYFNPINGGAASIGETIIDDKNYYFNQSGVLQTGVFSTEDGFKYFAPANTLDENLEGEAIDFTGKLIIDENIYYFDDNYRGAVEWKELDGEMHYFSPETGKAFKGLNQIGDYKYYFNSDGVMQKGFVSINDNKHYFDDSGVMKVGYTEIDGKHFYFAENGEMQIGVFNTEDGFKYFAHHNEDLGNEEGEEISYSGILNFNNKIYYFDDSFTAVVGWKDLEDGSKYYFDEDTAEAYIGLSLINDGQYYFNDDGIMQVGFVTINDKVFYFSDSGIIESGVQNIDDNYFYIDDNGIVQIGVFDTSDGYKYFAPANTVNDNIYGQAVEYSGLVRVGEDVYYFGETYTIETGWIYDMENESDKYYFNPETKKACKGINLIDDIKYYFDEKGIMRTGLISFENNNYYFNENGEMQFGYINIEDKMFYFGEDGVMQIGVFNTPDGFKYFAHQNTLDENFEGESINYTGWLDLDEKRYYFTDEYIAATGSVIIDGEEYYFDPDTAQLVISE

SEQ ID NO: 217 - protein, 2365 aa, synthetic construct
  REGION 1..2365: note = Synthetic amino acid sequence
SLVNRKQLEKMANVRFRTQEDEYVAILDALEEYHNMSENTVVEKYLKLKDINSLTDIYIDTYKKSGRNKALKKFKEYLVTEVLELKNNNLTPVEKNLHFVAIGGQINDTAINYINQWKDVNSDYNVNVFYDSNAFLINTLKKTVVESAINDTLESFRENLNDPRFDYNKFFRKRMEIIYDKQKNFINYYKAQREENPELIIDDIVKTYLSNEYSKEIDELNTYIEESLNKITQNSGNDVRNFEEFKNGESFNLYEQELVERWNLAAASDILRISALKEIGGMYLDVAMLPGIQPDLFESIEKPSSVTVDFWEMTKLEAIMKYKEYIPEYTSEHFDMLDEEVQSSFESVLASKSDKSEIFSSLGDMEASPLEVKIAFNSKGIINQGLISVKDSYCSNLIVKQIENRYKILNNSLNPAISEDNDFNTTTNTFIDSIMAEANADNGRFMMELGKYLRVGFFPDVKTTINLSGPEAYAAAYQDLLMFKEGSMNIHLIEADLRNFEISKTNISQSTEQQMAALWSFDDARAKAQFEEYKRNYFEGSLGEDDNLDFSQNIVVDKEYLLEKISSLARSSERGYIHYIVQLQGDKISYEAACNLFAKTPYDSVLFQKNIEDSEIAYYYNPGDGEIQEIDKYKIPSIISDRPKIKLTFIGHGKDEFNTDIFAGFDVDSLSTEIEAAIDLAKEDISPKSIEINLLGCNMFSYSINVEETYPGKLLLKVKDKISELMPSISQDSIIVSANQYEVRINSEGRRELLDHSGEWINKEESIIKDISSKEYISFNPKENKITVKSKNLPELSTLLQEIRNNSNSSDIELEEKVMLTECEINVISNIDTQIVEERIEEAKNLTSDSINYIKDEFKLIESISDALCDLKQQNELEDSHFISFEDISETDEGFSIRFINKETGESIFVETEKTIFSEYANHITEEISKIKGTIFDTVNGKLVKKVNLDTTHEVNTLNAAFFIQSLIEYNSSKESLSNLSVAMKVQVYAQLFSTGLNTITDAAKVVELVSTALDETIDLLPTLSEGLPIIATIIDGVSLGAAIKELSETSDPLLRQEIEAKIGIMAVNLTTATTAIITSSLGIASGFSILLVPLAGISAGIPSLVNNELVLRDKATKVVDYFKHVSLVETEGVFTLLDDKIMMPQDDLVISEIDFNNNSIVLGKCEIWRMEGGSGHTVTDDIDHFFSAPSITYREPHLSIYDVLEVQKEELDLSKDLMVLPNAPNRVFAWETGWTPGLRSLENDGTKLLDRIRDNYEGEFYWRYFAFIADALITTLKPRYEDTNIRINLDSNTRSFIVPIITTEYIREKLSYSFYGSGGTYALSLSQYNMGINIELSESDVWIIDVDNVVRDVTIESDKIKKGDLIEGILSTLSIEENKIILNSHEINFSGEVNGSNGFVSLTFSILEGINAIIEVDLLSKSYKLLISGELKILMLNSNHIQQKIDYIGFNSELQKNIPYSFVDSEGKENGFINGSTKEGLFVSELPDVVLISKVYMDDSKPSFGYYSNNLKDVKVITKDNVNILTGYYLKDDIKISLSLTLQDEKTIKLNSVHLDESGVAEILKFMNRKGNTNTSDSLMSFLESMNIKSIFVNFLQSNIKFILDANFIISGTTSIGQFEFICDENDNIQPYFIKFNTLETNYTLYVGNRQNMIVEPNYDLDDSGDISSTVINFSQKYLYGIDSCVNKVVISPNIYTDEINITPVYETNNTYPEVIVLDANYINEKINVNINDLSIRYVWSNDGNDFILMSTSEENKVSQVKIRFVNVFKDKTLANKLSFNFSDKQDVPVSEIILSFTPSYYEDGLIGYDLGLVSLYNEKFYINNFGMMVSGLIYINDSLYYFKPPVNNLITGFVTVGDDKYYFNPINGGAASIGETIIDDKNYYFNQSGVLQTGVFSTEDGFKYFAPANTLDENLEGEAIDFTGKLIIDENIYYFDDNYRGAVEWKELDGEMHYFSPETGKAFKGLNQIGDYKYYFNSDGVMQKGFVSINDNKHYFDDSGVMKVGYTEIDGKHFYFAENGEMQIGVFNTEDGFKYFAHHNEDLGNEEGEEISYSGILNFNNKIYYFDDSFTAVVGWKDLEDGSKYYFDEDTAEAYIGLSLINDGQYYFNDDGIMQVGFVTINDKVFYFSDSGIIESGVQNIDDNYFYIDDNGIVQIGVFDTSDGYKYFAPANTVNDNIYGQAVEYSGLVRVGEDVYYFGETYTIETGWIYDMENESDKYYFNPETKKACKGINLIDDIKYYFDEKGIMRTGLISFENNNYYFNENGEMQFGYINIEDKMFYFGEDGVMQIGVFNTPDGFKYFAHQNTLDENFEGESINYTGWLDLDEKRYYFTDEYIAATGSVIIDGEEYYFDPDTAQLVISE

SEQ ID NO: 218 - protein, 2365 aa, synthetic construct
  REGION 1..2365: note = Synthetic amino acid sequence
SLVNRKQLEKMANVRFRTQEDEYVAILDALEEYHNMSENTVVEKYLKLKDINSLTDIYIDTYKKSGRNKALKKFKEYLVTEVLELKNNNLTPVEKNLHFVAIGGQINDTAINYINQWKDVNSDYNVNVFYDSNAFLINTLKKTVVESAINDTLESFRENLNDPRFDYNKFFRKRMEIIYDKQKNFINYYKAQREENPELIIDDIVKTYLSNEYSKEIDELNTYIEESLNKITQNSGNDVRNFEEFKNGESFNLYEQELVERWNLAAASDILRISALKEIGGMYLDVAMLPGIQPDLFESIEKPSSVTVDFWEMTKLEAIMKYKEYIPEYTSEHFDMLDEEVQSSFESVLASKSDKSEIFSSLGDMEASPLEVKIAFNSKGIINQGLISVKDSYCSNLIVKQIENRYKILNNSLNPAISEDNDFNTTTNTFIDSIMAEANADNGRFMMELGKYLRVGFFPDVKTTINLSGPEAYAAAYQDLLMFKEGSMNIHLIEADLRNFEISKTNISQSTEQQMASLASFDDARAKAQFEEYKRNYFEGSLGEDDNLDFSQNIVVDKEYLLEKISSLARSSERGYIHYIVQLQGDKISYEAACNLFAKTPYDSVLFQKNIEDSEIAYYYNPGDGEIQEIDKYKIPSIISDRPKIKLTFIGHGKDEFNTDIFAGFDVDSLSTEIEAAIDLAKEDISPKSIEINLLGCNMFSYSINVEETYPGKLLLKVKDKISELMPSISQDSIIVSANQYEVRINSEGRRELLDHSGEWINKEESIIKDISSKEYISFNPKENKITVKSKNLPELSTLLQEIRNNSNSSDIELEEKVMLTECEINVISNIDTQIVEERIEEAKNLTSDSINYIKDEFKLIESISDALCDLKQQNELEDSHFISFEDISETDEGFSIRFINKETGESIFVETEKTIFSEYANHITEEISKIKGTIFDTVNGKLVKKVNLDTTHEVNTLNAAFFIQSLIEYNSSKESLSNLSVAMKVQVYAQLFSTGLNTITDAAKVVELVSTALDETIDLLPTLSEGLPIIATIIDGVSLGAAIKELSETSDPLLRQEIEAKIGIMAVNLTTATTAIITSSLGIASGFSILLVPLAGISAGIPSLVNNELVLRDKATKVVDYFKHVSLVETEGVFTLLDDKIMMPQDDLVISEIDFNNNSIVLGKCEIWRMEGGSGHTVTDDIDHFFSAPSITYREPHLSIYDVLEVQKEELDLSKDLMVLPNAPNRVFAWETGWTPGLRSLENDGTKLLDRIRDNYEGEFYWRYFAFIADALITTLKPRYEDTNIRINLDSNTRSFIVPIITTEYIREKLSYSFYGSGGTYALSLSQYNMGINIELSESDVWIIDVDNVVRDVTIESDKIKKGDLIEGILSTLSIEENKIILNSHEINFSGEVNGSNGFVSLTFSILEGINAIIEVDLLSKSYKLLISGELKILMLNSNHIQQKIDYIGFNSELQKNIPYSFVDSEGKENGFINGSTKEGLFVSELPDVVLISKVYMDDSKPSFGYYSNNLKDVKVITKDNVNILTGYYLKDDIKISLSLTLQDEKTIKLNSVHLDESGVAEILKFMNRKGNTNTSDSLMSFLESMNIKSIFVNFLQSNIKFILDANFIISGTTSIGQFEFICDENDNIQPYFIKFNTLETNYTLYVGNRQNMIVEPNYDLDDSGDISSTVINFSQKYLYGIDSCVNKVVISPNIYTDEINITPVYETNNTYPEVIVLDANYINEKINVNINDLSIRYVWSNDGNDFILMSTSEENKVSQVKIRFVNVFKDKTLANKLSFNFSDKQDVPVSEIILSFTPSYYEDGLIGYDLGLVSLYNEKFYINNFGMMVSGLIYINDSLYYFKPPVNNLITGFVTVGDDKYYFNPINGGAASIGETIIDDKNYYFNQSGVLQTGVFSTEDGFKYFAPANTLDENLEGEAIDFTGKLIIDENIYYFDDNYRGAVEWKELDGEMHYFSPETGKAFKGLNQIGDYKYYFNSDGVMQKGFVSINDNKHYFDDSGVMKVGYTEIDGKHFYFAENGEMQIGVFNTEDGFKYFAHHNEDLGNEEGEEISYSGILNFNNKIYYFDDSFTAVVGWKDLEDGSKYYFDEDTAEAYIGLSLINDGQYYFNDDGIMQVGFVTINDKVFYFSDSGIIESGVQNIDDNYFYIDDNGIVQIGVFDTSDGYKYFAPANTVNDNIYGQAVEYSGLVRVGEDVYYFGETYTIETGWIYDMENESDKYYFNPETKKACKGINLIDDIKYYFDEKGIMRTGLISFENNNYYFNENGEMQFGYINIEDKMFYFGEDGVMQIGVFNTPDGFKYFAHQNTLDENFEGESINYTGWLDLDEKRYYFTDEYIAATGSVIIDGEEYYFDPDTAQLVISE

SEQ ID NO: 219 - protein, 2365 aa, synthetic construct
  REGION 1..2365: note = Synthetic amino acid sequence
SLVNRKQLEKMANVRFRVQEDEYVAILDALEEYHNMSENTVVEKYLKLKDINSLTDIYIDTYKKSGRNKALKKFKEYLVTEVLELKNNNLTPVEKNLHFVAIGGQINDTAINYINQWKDVNSDYNVNVFYDSNAFLINTLKKTIVESATNDTLESFRENLNDPRFDYNKFYRKRMEIIYDKQKNFINYYKTQREENPDLIIDDIVKIYLSNEYSKDIDELNSYIEESLNKVTENSGNDVRNFEEFKGGESFKLYEQELVERWNLAAASDILRISALKEVGGVYLDVAMLPGIQPDLFESIEKPSSVTVDFWEMVKLEAIMKYKEYIPGYTSEHFDMLDEEVQSSFESVLASKSDKSEIFSSLGDMEASPLEVKIAFNSKGIINQGLISVKDSYCSNLIVKQIENRYKILNNSLNPAISEDNDFNTTTNAFIDSIMAEANADNGRFMMELGKYLRVGFFPDVKTTINLSGPEAYAAAYQDLLMFKEGSMNIHLIEADLRNFEISKTNISQSTEQQMASLWSFDDARAKAQFEEYKKNYFEGSLGEDDNLDFSQNTVVDKEYLLEKISSLARSSERGYIHYIVQLQGDKISYEAACNLFAKTPYDSVLFQKNIEDSEIAYYYNPGDGEIQEIDKYKIPSIISDRPKIKLTFIGHGKDEFNTDIFAGLDVDSLSTEIETAIDLAKEDISPKSIEINLLGCNMFSYSVNVEETYPGKLLLRVKDKVSELMPSISQDSIIVSANQYEVRINSEGRRELLDHSGEWINKEESIIKDISSKEYISFNPKENKIIVKSKNLPELSTLLQEIRNNSNSSDIELEEKVMLAECEINVISNIDTQVVEGRIEEAKSLTSDSINYIKNEFKLIESISDALYDLKQQNELEESHFISFEDILETDEGFSIRFIDKETGESIFVETEKAIFSEYANHITEEISKIKGTIFDTVNGKLVKKVNLDATHEVNTLNAAFFIQSLIEYNSSKESLSNLSVAMKVQVYAQLFSTGLNTITDAAKVVELVSTALDETIDLLPTLSEGLPVIATIIDGVSLGAAIKELSETSDPLLRQEIEAKIGIMAVNLTAATTAIITSSLGIASGFSILLVPLAGISAGIPSLVNNELILRDKATKVVDYFSHISLAESEGAFTSLDDKIMMPQDDLVISEIDFNNNSITLGKCEIWRMEGGSGHTVTDDIDHFFSAPSITYREPHLSIYDVLEVQKEELDLSKDLMVLPNAPNRVFAWETGWTPGLRSLENDGTKLLDRIRDNYEGEFYWRYFAFIADALITTLKPRYEDTNIRINLDSNTRSFIVPVITTEYIREKLSYSFYGSGGTYALSLSQYNMNINIELNENDTWVIDVDNVVRDVTIESDKIKKGDLIENILSKLSIEDNKIILDNHEINFSGTLNGGNGFVSLTFSILEGINAVIEVDLLSKSYKVLISGELKTLMANSNSVQQKIDYIGLNSELQKNIPYSFMDDKGKENGFINCSTKEGLFVSELSDVVLISKVYMDNSKPLFGYCSNDLKDVKVITKDDVIILTGYYLKDDIKISLSFTIQDENTIKLNGVYLDENGVAEILKFMNKKGSTNTSDSLMSFLESMNIKSIFINSLQSNTKLILDTNFIISGTTSIGQFEFICDKDNNIQPYFIKFNTLETKYTLYVGNRQNMIVEPNYDLDDSGDISSTVINFSQKYLYGIDSCVNKVIISPNIYTDEINITPIYEANNTYPEVIVLDTNYISEKINININDLSIRYVWSNDGSDFILMSTDEENKVSQVKIRFTNVFKGNTISDKISFNFSDKQDVSINKVISTFTPSYYVEGLLNYDLGLISLYNEKFYINNFGMMVSGLVYINDSLYYFKPPIKNLITGFTTIGDDKYYFNPDNGGAASVGETIIDGKNYYFSQNGVLQTGVFSTEDGFKYFAPADTLDENLEGEAIDFTGKLTIDENVYYFGDNYRAAIEWQTLDDEVYYFSTDTGRAFKGLNQIGDDKFYFNSDGIMQKGFVNINDKTFYFDDSGVMKSGYTEIDGKYFYFAENGEMQIGVFNTADGFKYFAHHDEDLGNEEGEALSYSGILNFNNKIYYFDDSFTAVVGWKDLEDGSKYYFDEDTAEAYIGISIINDGKYYFNDSGIMQIGFVTINNEVFYFSDSGIVESGMQNIDDNYFYIDENGLVQIGVFDTSDGYKYFAPANTVNDNIYGQAVEYSGLVRVGEDVYYFGETYTIETGWIYDMENESDKYYFDPETKKAYKGINVIDDIKYYFDENGIMRTGLITFEDNHYYFNEDGIMQYGYLNIEDKTFYFSEDGIMQIGVFNTPDGFKYFAHQNTLDENFEGESINYTGWLDLDEKRYYFTDEYIAATGSVIIDGEEYYFDPDTAQLVISE

SEQ ID NO: 220 - protein, 2365 aa, synthetic construct
  REGION 1..2365: note = Synthetic amino acid sequence
SLVNRKQLEKMANVRFRVQEDEYVAILDALEEYHNMSENTVVEKYLKLKDINSLTDIYIDTYKKSGRNKALKKFKEYLVTEVLELKNNNLTPVEKNLHFVAIGGQINDTAINYINQWKDVNSDYNVNVFYDSNAFLINTLKKTIVESATNDTLESFRENLNDPRFDYNKFYRKRMEIIYDKQKNFINYYKTQREENPDLIIDDIVKIYLSNEYSKDIDELNSYIEESLNKVTENSGNDVRNFEEFKGGESFKLYEQELVERWNLAAASDILRISALKEVGGVYLDVAMLPGIQPDLFESIEKPSSVTVDFWEMVKLEAIMKYKEYIPGYTSEHFDMLDEEVQSSFESVLASKSDKSEIFSSLGDMEASPLEVKIAFNSKGIINQGLISVKDSYCSNLIVKQIENRYKILNNSLNPAISEDNDFNTTTNAFIDSIMAEANADNGRFMMELGKYLRVGFFPDVKTTINLSGPEAYAAAYQDLLMFKEGSMNIHLIEADLRNFEISKTNISQSTEQQMASLASFDDARAKAQFEEYKKNYFEGSLGEDDNLDFSQNTVVDKEYLLEKISSLARSSERGYIHYIVQLQGDKISYEAACNLFAKTPYDSVLFQKNIEDSEIAYYYNPGDGEIQEIDKYKIPSIISDRPKIKLTFIGHGKDEFNTDIFAGLDVDSLSTEIETAIDLAKEDISPKSIEINLLGANMFSYSVNVEETYPGKLLLRVKDKVSELMPSISQDSIIVSANQYEVRINSEGRRELLDHSGEWINKEESIIKDISSKEYISFNPKENKIIVKSKNLPELSTLLQEIRNNSNSSDIELEEKVMLAECEINVISNIDTQVVEGRIEEAKSLTSDSINYIKNEFKLIESISDALYDLKQQNELEESHFISFEDILETDEGFSIRFIDKETGESIFVETEKAIFSEYANHITEEISKIKGTIFDTVNGKLVKKVNLDATHEVNTLNAAFFIQSLIEYNSSKESLSNLSVAMKVQVYAQLFSTGLNTITDAAKVVELVSTALDETIDLLPTLSEGLPVIATIIDGVSLGAAIKELSETSDPLLRQEIEAKIGIMAVNLTAATTAIITSSLGIASGFSILLVPLAGISAGIPSLVNNELILRDKATKVVDYFSHISLAESEGAFTSLDDKIMMPQDDLVISEIDFNNNSITLGKCEIWRMEGGSGHTVTDDIDHFFSAPSITYREPHLSIYDVLEVQKEELDLSKDLMVLPNAPNRVFAWETGWTPGLRSLENDGTKLLDRIRDNYEGEFYWRYFAFIADALITTLKPRYEDTNIRINLDSNTRSFIVPVITTEYIREKLSYSFYGSGGTYALSLSQYNMNINIELNENDTWVIDVDNVVRDVTIESDKIKKGDLIENILSKLSIEDNKIILDNHEINFSGTLNGGNGFVSLTFSILEGINAVIEVDLLSKSYKVLISGELKTLMANSNSVQQKIDYIGLNSELQKNIPYSFMDDKGKENGFINCSTKEGLFVSELSDVVLISKVYMDNSKPLFGYCSNDLKDVKVITKDDVIILTGYYLKDDIKISLSFTIQDENTIKLNGVYLDENGVAEILKFMNKKGSTNTSDSLMSFLESMNIKSIFINSLQSNTKLILDTNFIISGTTSIGQFEFICDKDNNIQPYFIKFNTLETKYTLYVGNRQNMIVEPNYDLDDSGDISSTVINFSQKYLYGIDSCVNKVIISPNIYTDEINITPIYEANNTYPEVIVLDTNYISEKINININDLSIRYVWSNDGSDFILMSTDEENKVSQVKIRFTNVFKGNTISDKISFNFSDKQDVSINKVISTFTPSYYVEGLLNYDLGLISLYNEKFYINNFGMMVSGLVYINDSLYYFKPPIKNLITGFTTIGDDKYYFNPDNGGAASVGETIIDGKNYYFSQNGVLQTGVFSTEDGFKYFAPADTLDENLEGEAIDFTGKLTIDENVYYFGDNYRAAIEWQTLDDEVYYFSTDTGRAFKGLNQIGDDKFYFNSDGIMQKGFVNINDKTFYFDDSGVMKSGYTEIDGKYFYFAENGEMQIGVFNTADGFKYFAHHDEDLGNEEGEALSYSGILNFNNKIYYFDDSFTAVVGWKDLEDGSKYYFDEDTAEAYIGISIINDGKYYFNDSGIMQIGFVTINNEVFYFSDSGIVESGMQNIDDNYFYIDENGLVQIGVFDTSDGYKYFAPANTVNDNIYGQAVEYSGLVRVGEDVYYFGETYTIETGWIYDMENESDKYYFDPETKKAYKGINVIDDIKYYFDENGIMRTGLITFEDNHYYFNEDGIMQYGYLNIEDKTFYFSEDGIMQIGVFNTPDGFKYFAHQNTLDENFEGESINYTGWLDLDEKRYYFTDEYIAATGSVIIDGEEYYFDPDTAQLVISE

SEQ ID NO: 221 - protein, 2365 aa, synthetic construct
  REGION 1..2365: note = Synthetic amino acid sequence
SLVNRKQLEKMANVRFRTQEDEYVAILDALEEYHNMSENTVVEKYLKLKDINSLTDIYIDTYKKSGRNKALKKFKEYLVTEVLELKNNNLTPVEKNLHFVAIGGQINDTAINYINQWKDVNSDYNVNVFYDSNAFLINTLKKTVVESAINDTLESFRENLNDPRFDYNKFFRKRMEIIYDKQKNFINYYKAQREENPELIIDDIVKTYLSNEYSKEIDELNTYIEESLNKITQNSGNDVRNFEEFKNGESFNLYEQELVERWNLAAASDILRISALKEIGGMYLDVAMLPGIQPDLFESIEKPSSVTVDFWEMTKLEAIMKYKEYIPEYTSEHFDMLDEEVQSSFESVLASKSDKSEIFSSLGDMEASPLEVKIAFNSKGIINQGLISVKDSYCSNLIVKQIENRYKILNNSLNPAISEDNDFNTTTNTFIDSIMAEANADNGRFMMELGKYLRVGFFPDVKTTINLSGPEAYAAAYQDLLMFKEGSMNIHLIEADLRNFEISKTNISQSTEQQMASLASFDDARAKAQFEEYKRNYFEGSLGEDDNLDFSQNIVVDKEYLLEKISSLARSSERGYIHYIVQLQGDKISYEAACNLFAKTPYDSVLFQKNIEDSEIAYYYNPGDGEIQEIDKYKIPSIISDRPKIKLTFIGHGKDEFNTDIFAGFDVDSLSTEIEAAIDLAKEDISPKSIEINLLGANMFSYSINVEETYPGKLLLKVKDKISELMPSISQDSIIVSANQYEVRINSEGRRELLDHSGEWINKEESIIKDISSKEYISFNPKENKITVKSKNLPELSTLLQEIRNNSNSSDIELEEKVMLTECEINVISNIDTQIVEERIEEAKNLTSDSINYIKDEFKLIESISDALCDLKQQNELEDSHFISFEDISETDEGFSIRFINKETGESIFVETEKTIFSEYANHITEEISKIKGTIFDTVNGKLVKKVNLDTTHEVNTLNAAFFIQSLIEYNSSKESLSNLSVAMKVQVYAQLFSTGLNTITDAAKVVELVSTALDETIDLLPTLSEGLPIIATIIDGVSLGAAIKELSETSDPLLRQEIEAKIGIMAVNLTTATTAIITSSLGIASGFSILLVPLAGISAGIPSLVNNELVLRDKATKVVDYFKHVSLVETEGVFTLLDDKIMMPQDDLVISEIDFNNNSIVLGKCEIWRMEGGSGHTVTDDIDHFFSAPSITYREPHLSIYDVLEVQKEELDLSKDLMVLPNAPNRVFAWETGWTPGLRSLENDGTKLLDRIRDNYEGEFYWRYFAFIADALITTLKPRYEDTNIRINLDSNTRSFIVPIITTEYIREKLSYSFYGSGGTYALSLSQYNMGINIELSESDVWIIDVDNVVRDVTIESDKIKKGDLIEGILSTLSIEENKIILNSHEINFSGEVNGSNGFVSLTFSILEGINAIIEVDLLSKSYKLLISGELKILMLNSNHIQQKIDYIGFNSELQKNIPYSFVDSEGKENGFINGSTKEGLFVSELPDVVLISKVYMDDSKPSFGYYSNNLKDVKVITKDNVNILTGYYLKDDIKISLSLTLQDEKTIKLNSVHLDESGVAEILKFMNRKGNTNTSDSLMSFLESMNIKSIFVNFLQSNIKFILDANFIISGTTSIGQFEFICDENDNIQPYFIKFNTLETNYTLYVGNRQNMIVEPNYDLDDSGDISSTVINFSQKYLYGIDSCVNKVVISPNIYTDEINITPVYETNNTYPEVIVLDANYINEKINVNINDLSIRYVWSNDGNDFILMSTSEENKVSQVKIRFVNVFKDKTLANKLSFNFSDKQDVPVSEIILSFTPSYYEDGLIGYDLGLVSLYNEKFYINNFGMMVSGLIYINDSLYYFKPPVNNLITGFVTVGDDKYYFNPINGGAASIGETIIDDKNYYFNQSGVLQTGVFSTEDGFKYFAPANTLDENLEGEAIDFTGKLIIDENIYYFDDNYRGAVEWKELDGEMHYFSPETGKAFKGLNQIGDYKYYFNSDGVMQKGFVSINDNKHYFDDSGVMKVGYTEIDGKHFYFAENGEMQIGVFNTEDGFKYFAHHNEDLGNEEGEEISYSGILNFNNKIYYFDDSFTAVVGWKDLEDGSKYYFDEDTAEAYIGLSLINDGQYYFNDDGIMQVGFVTINDKVFYFSDSGIIESGVQNIDDNYFYIDDNGIVQIGVFDTSDGYKYFAPANTVNDNIYGQAVEYSGLVRVGEDVYYFGETYTIETGWIYDMENESDKYYFNPETKKACKGINLIDDIKYYFDEKGIMRTGLISFENNNYYFNENGEMQFGYINIEDKMFYFGEDGVMQIGVFNTPDGFKYFAHQNTLDENFEGESINYTGWLDLDEKRYYFTDEYIAATGSVIIDGEEYYFDPDTAQLVISE

SEQ ID NO: 222 - protein, 2365 aa, synthetic construct
  REGION 1..2365: note = Synthetic amino acid sequence
  VARIANT 101: note = Xaa is any amino acid, but not Trp
  VARIANT 287: note = Xaa is any amino acid, but not Asp
  VARIANT 514: note = Xaa is any amino acid, but not Glu
  VARIANT 519: note = Xaa is any amino acid, but not Trp
  VARIANT 697: note = Xaa is any amino acid, but not Cys
SLVNRKQLEKMANVRFRVQEDEYVAILDALEEYHNMSENTVVEKYLKLKDINSLTDIYIDTYKKSGRNKALKKFKEYLVTEVLELKNNNLTPVEKNLHFVXIGGQINDTAINYINQWKDVNSDYNVNVFYDSNAFLINTLKKTIVESATNDTLESFRENLNDPRFDYNKFYRKRMEIIYDKQKNFINYYKTQREENPDLIIDDIVKIYLSNEYSKDIDELNSYIEESLNKVTENSGNDVRNFEEFKGGESFKLYEQELVERWNLAAASDILRISALKEVGGVYLDVXMLPGIQPDLFESIEKPSSVTVDFWEMVKLEAIMKYKEYIPGYTSEHFDMLDEEVQSSFESVLASKSDKSEIFSSLGDMEASPLEVKIAFNSKGIINQGLISVKDSYCSNLIVKQIENRYKILNNSLNPAISEDNDFNTTTNAFIDSIMAEANADNGRFMMELGKYLRVGFFPDVKTTINLSGPEAYAAAYQDLLMFKEGSMNIHLIEADLRNFEISKTNISQSTEQXMASLXSFDDARAKAQFEEYKKNYFEGSLGEDDNLDFSQNTVVDKEYLLEKISSLARSSERGYIHYIVQLQGDKISYEAACNLFAKTPYDSVLFQKNIEDSEIAYYYNPGDGEIQEIDKYKIPSIISDRPKIKLTFIGHGKDEFNTDIFAGLDVDSLSTEIETAIDLAKEDISPKSIEINLLGXNMFSYSVNVEETYPGKLLLRVKDKVSELMPSISQDSIIVSANQYEVRINSEGRRELLDHSGEWINKEESIIKDISSKEYISFNPKENKIIVKSKNLPELSTLLQEIRNNSNSSDIELEEKVMLAECEINVISNIDTQVVEGRIEEAKSLTSDSINYIKNEFKLIESISDALYDLKQQNELEESHFISFEDILETDEGFSIRFIDKETGESIFVETEKAIFSEYANHITEEISKIKGTIFDTVNGKLVKKVNLDATHEVNTLNAAFFIQSLIEYNSSKESLSNLSVAMKVQVYAQLFSTGLNTITDAAKVVELVSTALDETIDLLPTLSEGLPVIATIIDGVSLGAAIKELSETSDPLLRQEIEAKIGIMAVNLTAATTAIITSSLGIASGFSILLVPLAGISAGIPSLVNNELILRDKATKVVDYFSHISLAESEGAFTSLDDKIMMPQDDLVISEIDFNNNSITLGKCEIWRMEGGSGHTVTDDIDHFFSAPSITYREPHLSIYDVLEVQKEELDLSKDLMVLPNAPNRVFAWETGWTPGLRSLENDGTKLLDRIRDNYEGEFYWRYFAFIADALITTLKPRYEDTNIRINLDSNTRSFIVPVITTEYIREKLSYSFYGSGGTYALSLSQYNMNINIELNENDTWVIDVDNVVRDVTIESDKIKKGDLIENILSKLSIEDNKIILDNHEINFSGTLNGGNGFVSLTFSILEGINAVIEVDLLSKSYKVLISGELKTLMANSNSVQQKIDYIGLNSELQKNIPYSFMDDKGKENGFINCSTKEGLFVSELSDVVLISKVYMDNSKPLFGYCSNDLKDVKVITKDDVIILTGYYLKDDIKISLSFTIQDENTIKLNGVYLDENGVAEILKFMNKKGSTNTSDSLMSFLESMNIKSIFINSLQSNTKLILDTNFIISGTTSIGQFEFICDKDNNIQPYFIKFNTLETKYTLYVGNRQNMIVEPNYDLDDSGDISSTVINFSQKYLYGIDSCVNKVIISPNIYTDEINITPIYEANNTYPEVIVLDTNYISEKINININDLSIRYVWSNDGSDFILMSTDEENKVSQVKIRFTNVFKGNTISDKISFNFSDKQDVSINKVISTFTPSYYVEGLLNYDLGLISLYNEKFYINNFGMMVSGLVYINDSLYYFKPPIKNLITGFTTIGDDKYYFNPDNGGAASVGETIIDGKNYYFSQNGVLQTGVFSTEDGFKYFAPADTLDENLEGEAIDFTGKLTIDENVYYFGDNYRAAIEWQTLDDEVYYFSTDTGRAFKGLNQIGDDKFYFNSDGIMQKGFVNINDKTFYFDDSGVMKSGYTEIDGKYFYFAENGEMQIGVFNTADGFKYFAHHDEDLGNEEGEALSYSGILNFNNKIYYFDDSFTAVVGWKDLEDGSKYYFDEDTAEAYIGISIINDGKYYFNDSGIMQIGFVTINNEVFYFSDSGIVESGMQNIDDNYFYIDENGLVQIGVFDTSDGYKYFAPANTVNDNIYGQAVEYSGLVRVGEDVYYFGETYTIETGWIYDMENESDKYYFDPETKKAYKGINVIDDIKYYFDENGIMRTGLITFEDNHYYFNEDGIMQYGYLNIEDKTFYFSEDGIMQIGVFNTPDGFKYFAHQNTLDENFEGESINYTGWLDLDEKRYYFTDEYIAATGSVIIDGEEYYFDPDTAQLVISE

SEQ ID NO: 223 - protein, 769 aa, Clostridium difficile
MSLISKEELIKLAYSIRPRENEYKTILTNLDEYNKLTTNNNENKYLQLKKLNESIDVFMNKYKTSSRNRALSNLKKDILKEVILIKNSNTSPVEKNLHFVWIGGEVSDIALEYIKQWADINAEYNIKLWYDSEAFLVNTLKKAIVESSTTEALQLLEEEIQNPQFDNMKFYKKRMEFIYDRQKRFINYYKSQINKPTVPTIDDIIKSHLVSEYNRDETVLESYRTNSLRKINSNHGIDIRANSLFTEQELLNIYSQELLNRGNLAAASDIVRLLALKNFGGVYLDVDMLPGIHSDLFKTISRPSSIGLDRWEMIKLEAIMKYKKYINNYTSENFDKLDQQLKDNFKLIIESKSEKSEIFSKLENLNVSDLEIKIAFALGSVINQALISKQGSYLTNLVIEQVKNRYQFLNQHLNPAIESDNNFTDTTKIFHDSLFNSATAENSMFLTKIAPYLQVGFMPEARSTISLSGPGAYASAYYDFINLQENTIEKTLKASDLIEFKFPENNLSQLTEQEINSLWSFDQASAKYQFEKYVRDYTGGSLSEDNGVDFNKNTALDKNYLLNNKIPSNNVEEAGSKNYVHYIIQLQGDDISYEATCNLFSKNPKNSIIIQRNMNESAKSYFLSDDGESILELNKYRIPERLKNKEKVKVTFIGHGKDEFNTSEFARLSVDSLSNEISSFLDTIKLDISPKNVEVNLLGCNMFSYDFNVEETYPGKLLLSIMDKITSTLPDVNKNSITIGANQYEVRINSEGRKELLAHSGKWINKEEA

SEQ ID NO: 224 - protein, 541 aa, Clostridium difficile
MSLISKEELIKLAYSIRPRENEYKTILTNLDEYNKLTTNNNENKYLQLKKLNESIDVFMNKYKTSSRNRALSNLKKDILKEVILIKNSNTSPVEKNLHFVWIGGEVSDIALEYIKQWADINAEYNIKLWYDSEAFLVNTLKKAIVESSTTEALQLLEEEIQNPQFDNMKFYKKRMEFIYDRQKRFINYYKSQINKPTVPTIDDIIKSHLVSEYNRDETVLESYRTNSLRKINSNHGIDIRANSLFTEQELLNIYSQELLNRGNLAAASDIVRLLALKNFGGVYLDVDMLPGIHSDLFKTISRPSSIGLDRWEMIKLEAIMKYKKYINNYTSENFDKLDQQLKDNFKLIIESKSEKSEIFSKLENLNVSDLEIKIAFALGSVINQALISKQGSYLTNLVIEQVKNRYQFLNQHLNPAIESDNNFTDTTKIFHDSLFNSATAENSMFLTKIAPYLQVGFMPEARSTISLSGPGAYASAYYDFINLQENTIEKTLKASDLIEFKFPENNLSQLTEQEINSLWSFDQASAKYQFEKYVRDYTGGS

SEQ ID NO: 225 - protein, 228 aa, Clostridium difficile
LSEDNGVDFNKNTALDKNYLLNNKIPSNNVEEAGSKNYVHYIIQLQGDDISYEATCNLFSKNPKNSIIIQRNMNESAKSYFLSDDGESILELNKYRIPERLKNKEKVKVTFIGHGKDEFNTSEFARLSVDSLSNEISSFLDTIKLDISPKNVEVNLLGCNMFSYDFNVEETYPGKLLLSIMDKITSTLPDVNKNSITIGANQYEVRINSEGRKELLAHSGKWINKEEA

SEQ ID NO: 226 - protein, 1039 aa, Clostridium difficile
IMSDLSSKEYIFFDSIDNKLKAKSKNIPGLASISEDIKTLLLDASVSPDTKFILNNLKLNIESSIGDYIYYEKLEPVKNIIHNSIDDLIDEFNLLENVSDELYELKKLNNLDEKYLISFEDISKNNSTYSVRFINKSNGESVYVETEKEIFSKYSEHITKEISTIKNSIITDVNGNLLDNIQLDHTSQVNTLNAAFFIQSLIDYSSNKDVLNDLSTSVKVQLYAQLFSTGLNTIYDSIQLVNLISNAVNDTINVLPTITEGIPIVSTILDGINLGAAIKELLDEHDPLLKKELEAKVGVLAINMSLSIAATVASIVGIGAEVTIFLLPIAGISAGIPSLVNNELILHDKATSVVNYFNHLSESKKYGPLKTEDDKILVPIDDLVISEIDFNNNSIKLGTCNILAMEGGSGHTVTGNIDHFFSSPSISSHIPSLSIYSAIGIETENLDFSKKIMMLPNAPSRVFWWETGAVPGLRSLENDGTRLLDSIRDLYPGKFYWRFYAFFDYAITTLKPVYEDTNIKIKLDKDTRNFIMPTITTNEIRNKLSYSFDGAGGTYSLLLSSYPISTNINLSKDDLWIFNIDNEVREISIENGTIKKGKLIKDVLSKIDINKNKLIIGNQTIDFSGDIDNKDRYIFLTCELDDKISLIIEINLVAKSYSLLLSGDKNYLISNLSNIIEKINTLGLDSKNIAYNYTDESNNKYFGAISKTSQKSIIHYKKDSKNILEFYNDSTLEFNSKDFIAEDINVFMKDDINTITGKYYVDNNTDKSIDFSISLVSKNQVKVNGLYLNESVYSSYLDFVKNSDGHHNTSNFMNLFLDNISFWKLFGFENINFVIDKYFTLVGKTNLGYVEFICDNNKNIDIYFGEWKTSSSKSTIFSGNGRNVVVEPIYNPDTGEDISTSLDFSYEPLYGIDRYINKVLIAPDLYTSLININTNYYSNEYYPEIIVLNPNTFHKKVNINLDSSSFEYKWSTEGSDFILVRYLEESNKKILQKIRIKGILSNTQSFNKMSIDFKDIKKLSLGYIMSNFKSFNSENELDR

SEQ ID NO: 227 - protein, 266 aa, Clostridium difficile
AEDINVFMKDDINTITGKYYVDNNTDKSIDFSISLVSKNQVKVNGLYLNESVYSSYLDFVKNSDGHHNTSNFMNLFLDNISFWKLFGFENINFVIDKYFTLVGKTNLGYVEFICDNNKNIDIYFGEWKTSSSKSTIFSGNGRNVVVEPIYNPDTGEDISTSLDFSYEPLYGIDRYINKVLIAPDLYTSLININTNYYSNEYYPEIIVLNPNTFHKKVNINLDSSSFEYKWSTEGSDFILVRYLEESNKKILQKIRIKGILSNTQSF

SEQ ID NO: 228 - protein, 902 aa, Clostridium difficile
DHLGFKIIDNKTYYYDEDSKLVKGLININNSLFYFDPIEFNLVTGWQTINGKKYYFDINTGAALISYKIINGKHFYFNNDGVMQLGVFKGPDGFEYFAPANTQNNNIEGQAIVYQSKFLTLNGKKYYFDNDSKAVTGWRIINNEKYYFNPNNAIAAVGLQVIDNNKYYFNPDTAIISKGWQTVNGSRYYFDTDTAIAFNGYKTIDGKHFYFDSDCVVKIGVFSTSNGFEYFAPANTYNNNIEGQAIVYQSKFLTLNGKKYYFDNNSKAVTGWQTIDSKKYYFNTNTAEAATGWQTIDGKKYYFNTNTAEAATGWQTIDGKKYYFNTNTAIASTGYTIINGKHFYFNTDGIMQIGVFKGPNGFEYFAPANTDANNIEGQAILYQNEFLTLNGKKYYFGSDSKAVTGWRIINNKKYYFNPNNAIAAIHLCTINNDKYYFSYDGILQNGYITIERNNFYFDANNESKMVTGVFKGPNGFEYFAPANTHNNNIEGQAIVYQNKFLTLNGKKYYFDNDSKAVTGWQTIDGKKYYFNLNTAEAATGWQTIDGKKYYFNLNTAEAATGWQTIDGKKYYFNTNTFIASTGYTSINGKHFYFNTDGIMQIGVFKGPNGFEYFAPANTHNNNIEGQAILYQNKFLTLNGKKYYFGSDSKAVTGLRTIDGKKYYFNTNTAVAVTGWQTINGKKYYFNTNTSIASTGYTIISGKHFYFNTDGIMQIGVFKGPDGFEYFAPANTDANNIEGQAIRYQNRFLYLHDNIYYFGNNSKAATGWVTIDGNRYYFEPNTAMGANGYKTIDNKNFYFRNGLPQIGVFKGSNGFEYFAPANTDANNIEGQAIRYQNRFLHLLGKIYYFGNNSKAVTGWQTINGKVYYFMPDTAMAAAGGLFEIDGVIYFFGVDGVKAPGIYG

SEQ ID NO: 229 - protein, 204 aa, Clostridium difficile
RYYFDTDTAIAFNGYKTIDGKHFYFDSDCVVKIGVFSTSNGFEYFAPANTYNNNIEGQAIVYQSKFLTLNGKKYYFDNNSKAVTGWQTIDSKKYYFNTNTAEAATGWQTIDGKKYYFNTNTAEAATGWQTIDGKKYYFNTNTAIASTGYTIINGKHFYFNTDGIMQIGVFKGPNGFEYFAPANTDANNIEGQAILYQNEFLTLN

SEQ ID NO: 230 - protein, 457 aa, Clostridium difficile
ILQNGYITIERNNFYFDANNESKMVTGVFKGPNGFEYFAPANTHNNNIEGQAIVYQNKFLTLNGKKYYFDNDSKAVTGWQTIDGKKYYFNLNTAEAATGWQTIDGKKYYFNLNTAEAATGWQTIDGKKYYFNTNTFIASTGYTSINGKHFYFNTDGIMQIGVFKGPNGFEYFAPANTHNNNIEGQAILYQNKFLTLNGKKYYFGSDSKAVTGLRTIDGKKYYFNTNTAVAVTGWQTINGKKYYFNTNTSIASTGYTIISGKHFYFNTDGIMQIGVFKGPDGFEYFAPANTDANNIEGQAIRYQNRFLYLHDNIYYFGNNSKAATGWVTIDGNRYYFEPNTAMGANGYKTIDNKNFYFRNGLPQIGVFKGSNGFEYFAPANTDANNIEGQAIRYQNRFLHLLGKIYYFGNNSKAVTGWQTINGKVYYFMPDTAMAAAGGLFEIDGVIYFFGVDGVKAP

SEQ ID NO: 231 - protein, 320 aa, Clostridium difficile
ASTGYTSINGKHFYFNTDGIMQIGVFKGPNGFEYFAPANTHNNNIEGQAILYQNKFLTLNGKKYYFGSDSKAVTGLRTIDGKKYYFNTNTAVAVTGWQTINGKKYYFNTNTSIASTGYTIISGKHFYFNTDGIMQIGVFKGPDGFEYFAPANTDANNIEGQAIRYQNRFLYLHDNIYYFGNNSKAATGWVTIDGNRYYFEPNTAMGANGYKTIDNKNFYFRNGLPQIGVFKGSNGFEYFAPANTDANNIEGQAIRYQNRFLHLLGKIYYFGNNSKAVTGWQTINGKVYYFMPDTAMAAAGGLFEIDGVIYFFGVDGVKAP

SEQ ID NO: 232 - protein, 864 aa, Clostridium difficile
FDPIEFNLVTGWQTINGKKYYFDINTGAALISYKIINGKHFYFNNDGVMQLGVFKGPDGFEYFAPANTQNNNIEGQAIVYQSKFLTLNGKKYYFDNDSKAVTGWRIINNEKYYFNPNNAIAAVGLQVIDNNKYYFNPDTAIISKGWQTVNGSRYYFDTDTAIAFNGYKTIDGKHFYFDSDCVVKIGVFSTSNGFEYFAPANTYNNNIEGQAIVYQSKFLTLNGKKYYFDNNSKAVTGWQTIDSKKYYFNTNTAEAATGWQTIDGKKYYFNTNTAEAATGWQTIDGKKYYFNTNTAIASTGYTIINGKHFYFNTDGIMQIGVFKGPNGFEYFAPANTDANNIEGQAILYQNEFLTLNGKKYYFGSDSKAVTGWRIINNKKYYFNPNNAIAAIHLCTINNDKYYFSYDGILQNGYITIERNNFYFDANNESKMVTGVFKGPNGFEYFAPANTHNNNIEGQAIVYQNKFLTLNGKKYYFDNDSKAVTGWQTIDGKKYYFNLNTAEAATGWQTIDGKKYYFNLNTAEAATGWQTIDGKKYYFNTNTFIASTGYTSINGKHFYFNTDGIMQIGVFKGPNGFEYFAPANTHNNNIEGQAILYQNKFLTLNGKKYYFGSDSKAVTGLRTIDGKKYYFNTNTAVAVTGWQTINGKKYYFNTNTSIASTGYTIISGKHFYFNTDGIMQIGVFKGPDGFEYFAPANTDANNIEGQAIRYQNRFLYLHDNIYYFGNNSKAATGWVTIDGNRYYFEPNTAMGANGYKTIDNKNFYFRNGLPQIGVFKGSNGFEYFAPANTDANNIEGQAIRYQNRFLHLLGKIYYFGNNSKAVTGWQTINGKVYYFMPDTAMAAAGGLFEIDGVIYFFGVDGVKAP

SEQ ID NO: 233 - protein, 403 aa, Clostridium difficile
YQNKFLTLNGKKYYFDNDSKAVTGWQTIDGKKYYFNLNTAEAATGWQTIDGKKYYFNLNTAEAATGWQTIDGKKYYFNTNTFIASTGYTSINGKHFYFNTDGIMQIGVFKGPNGFEYFAPANTHNNNIEGQAILYQNKFLTLNGKKYYFGSDSKAVTGLRTIDGKKYYFNTNTAVAVTGWQTINGKKYYFNTNTSIASTGYTIISGKHFYFNTDGIMQIGVFKGPDGFEYFAPANTDANNIEGQAIRYQNRFLYLHDNIYYFGNNSKAATGWVTIDGNRYYFEPNTAMGANGYKTIDNKNFYFRNGLPQIGVFKGSNGFEYFAPANTDANNIEGQAIRYQNRFLHLLGKIYYFGNNSKAVTGWQTINGKVYYFMPDTAMAAAGGLFEIDGVIYFFGVDGVKAP

SEQ ID NO: 234 - protein, 872 aa, Clostridium difficile
SLFYFDPIEFNLVTGWQTINGKKYYFDINTGAALISYKIINGKHFYFNNDGVMQLGVFKGPDGFEYFAPANTQNNNIEGQAIVYQSKFLTLNGKKYYFDNDSKAVTGWRIINNEKYYFNPNNAIAAVGLQVIDNNKYYFNPDTAIISKGWQTVNGSRYYFDTDTAIAFNGYKTIDGKHFYFDSDCVVKIGVFSTSNGFEYFAPANTYNNNIEGQAIVYQSKFLTLNGKKYYFDNNSKAVTGWQTIDSKKYYFNTNTAEAATGWQTIDGKKYYFNTNTAEAATGWQTIDGKKYYFNTNTAIASTGYTIINGKHFYFNTDGIMQIGVFKGPNGFEYFAPANTDANNIEGQAILYQNEFLTLNGKKYYFGSDSKAVTGWRIINNKKYYFNPNNAIAAIHLCTINNDKYYFSYDGILQNGYITIERNNFYFDANNESKMVTGVFKGPNGFEYFAPANTHNNNIEGQAIVYQNKFLTLNGKKYYFDNDSKAVTGWQTIDGKKYYFNLNTAEAATGWQTIDGKKYYFNLNTAEAATGWQTIDGKKYYFNTNTFIASTGYTSINGKHFYFNTDGIMQIGVFKGPNGFEYFAPANTHNNNIEGQAILYQNKFLTLNGKKYYFGSDSKAVTGLRTIDGKKYYFNTNTAVAVTGWQTINGKKYYFNTNTSIASTGYTIISGKHFYFNTDGIMQIGVFKGPDGFEYFAPANTDANNIEGQAIRYQNRFLYLHDNIYYFGNNSKAATGWVTIDGNRYYFEPNTAMGANGYKTIDNKNFYFRNGLPQIGVFKGSNGFEYFAPANTDANNIEGQAIRYQNRFLHLLGKIYYFGNNSKAVTGWQTINGKVYYFMPDTAMAAAGGLFEIDGVIYFFGVDGVKAPGIYG

SEQ ID NO: 235 - protein, 743 aa, Clostridium difficile
AVGLQVIDNNKYYFNPDTAIISKGWQTVNGSRYYFDTDTAIAFNGYKTIDGKHFYFDSDCVVKIGVFSTSNGFEYFAPANTYNNNIEGQAIVYQSKFLTLNGKKYYFDNNSKAVTGWQTIDSKKYYFNTNTAEAATGWQTIDGKKYYFNTNTAEAATGWQTIDGKKYYFNTNTAIASTGYTIINGKHFYFNTDGIMQIGVFKGPNGFEYFAPANTDANNIEGQAILYQNEFLTLNGKKYYFGSDSKAVTGWRIINNKKYYFNPNNAIAAIHLCTINNDKYYFSYDGILQNGYITIERNNFYFDANNESKMVTGVFKGPNGFEYFAPANTHNNNIEGQAIVYQNKFLTLNGKKYYFDNDSKAVTGWQTIDGKKYYFNLNTAEAATGWQTIDGKKYYFNLNTAEAATGWQTIDGKKYYFNTNTFIASTGYTSINGKHFYFNTDGIMQIGVFKGPNGFEYFAPANTHNNNIEGQAILYQNKFLTLNGKKYYFGSDSKAVTGLRTIDGKKYYFNTNTAVAVTGWQTINGKKYYFNTNTSIASTGYTIISGKHFYFNTDGIMQIGVFKGPDGFEYFAPANTDANNIEGQAIRYQNRFLYLHDNIYYFGNNSKAATGWVTIDGNRYYFEPNTAMGANGYKTIDNKNFYFRNGLPQIGVFKGSNGFEYFAPANTDANNIEGQAIRYQNRFLHLLGKIYYFGNNSKAVTGWQTINGKVYYFMPDTAMAAAGGLFEIDGVIYFFGVDGVKAP

SEQ ID NO: 236 - protein, 816 aa, Clostridium difficile
MQLGVFKGPDGFEYFAPANTQNNNIEGQAIVYQSKFLTLNGKKYYFDNDSKAVTGWRIINNEKYYFNPNNAIAAVGLQVIDNNKYYFNPDTAIISKGWQTVNGSRYYFDTDTAIAFNGYKTIDGKHFYFDSDCVVKIGVFSTSNGFEYFAPANTYNNNIEGQAIVYQSKFLTLNGKKYYFDNNSKAVTGWQTIDSKKYYFNTNTAEAATGWQTIDGKKYYFNTNTAEAATGWQTIDGKKYYFNTNTAIASTGYTIINGKHFYFNTDGIMQIGVFKGPNGFEYFAPANTDANNIEGQAILYQNEFLTLNGKKYYFGSDSKAVTGWRIINNKKYYFNPNNAIAAIHLCTINNDKYYFSYDGILQNGYITIERNNFYFDANNESKMVTGVFKGPNGFEYFAPANTHNNNIEGQAIVYQNKFLTLNGKKYYFDNDSKAVTGWQTIDGKKYYFNLNTAEAATGWQTIDGKKYYFNLNTAEAATGWQTIDGKKYYFNTNTFIASTGYTSINGKHFYFNTDGIMQIGVFKGPNGFEYFAPANTHNNNIEGQAILYQNKFLTLNGKKYYFGSDSKAVTGLRTIDGKKYYFNTNTAVAVTGWQTINGKKYYFNTNTSIASTGYTIISGKHFYFNTDGIMQIGVFKGPDGFEYFAPANTDANNIEGQAIRYQNRFLYLHDNIYYFGNNSKAATGWVTIDGNRYYFEPNTAMGANGYKTIDNKNFYFRNGLPQIGVFKGSNGFEYFAPANTDANNIEGQAIRYQNRFLHLLGKIYYFGNNSKAVTGWQTINGKVYYFMPDTAMAAAGGLFEIDGVIYFFGVDGVKAP

SEQ ID NO: 237 - protein, 767 aa, Clostridium difficile
MSLVNRKQLEKMANVRFRTQEDEYVAILDALEEYHNMSENTVVEKYLKLKDINSLTDIYIDTYKKSGRNKALKKFKEYLVTEVLELKNNNLTPVEKNLHFVWIGGQINDTAINYINQWKDVNSDYNVNVFYDSNAFLINTLKKTVVESAINDTLESFRENLNDPRFDYNKFFRKRMEIIYDKQKNFINYYKAQREENPELIIDDIVKTYLSNEYSKEIDELNTYIEESLNKITQNSGNDVRNFEEFKNGESFNLYEQELVERWNLAAASDILRISALKEIGGMYLDVDMLPGIQPDLFESIEKPSSVTVDFWEMTKLEAIMKYKEYIPEYTSEHFDMLDEEVQSSFESVLASKSDKSEIFSSLGDMEASPLEVKIAFNSKGIINQGLISVKDSYCSNLIVKQIENRYKILNNSLNPAISEDNDFNTTTNTFIDSIMAEANADNGRFMMELGKYLRVGFFPDVKTTINLSGPEAYAAAYQDLLMFKEGSMNIHLIEADLRNFEISKTNISQSTEQEMASLWSFDDARAKAQFEEYKRNYFEGSLGEDDNLDFSQNIVVDKEYLLEKISSLARSSERGYIHYIVQLQGDKISYEAACNLFAKTPYDSVLFQKNIEDSEIAYYYNPGDGEIQEIDKYKIPSIISDRPKIKLTFIGHGKDEFNTDIFAGFDVDSLSTEIEAAIDLAKEDISPKSIEINLLGCNMFSYSINVEETYPGKLLLKVKDKISELMPSISQDSIIVSANQYEVRINSEGRRELLDHSGEWINKEES

SEQ ID NO: 238 - protein, 543 aa, Clostridium difficile; identical to SEQ ID NO: 31

SEQ ID NO: 239 - protein, 224 aa, Clostridium difficile; identical to SEQ ID NO: 33

SEQ ID NO: 240 - protein, 1066 aa, Clostridium difficile
IIKDISSKEYISFNPKENKITVKSKNLPELSTLLQEIRNNSNSSDIELEEKVMLTECEINVISNIDTQIVEERIEEAKNLTSDSINYIKDEFKLIESISDALCDLKQQNELEDSHFISFEDISETDEGFSIRFINKETGESIFVETEKTIFSEYANHITEEISKIKGTIFDTVNGKLVKKVNLDTTHEVNTLNAAFFIQSLIEYNSSKESLSNLSVAMKVQVYAQLFSTGLNTITDAAKVVELVSTALDETIDLLPTLSEGLPIIATIIDGVSLGAAIKELSETSDPLLRQEIEAKIGIMAVNLTTATTAIITSSLGIASGFSILLVPLAGISAGIPSLVNNELVLRDKATKVVDYFKHVSLVETEGVFTLLDDKIMMPQDDLVISEIDFNNNSIVLGKCEIWRMEGGSGHTVTDDIDHFFSAPSITYREPHLSIYDVLEVQKEELDLSKDLMVLPNAPNRVFAWETGWTPGLRSLENDGTKLLDRIRDNYEGEFYWRYFAFIADALITTLKPRYEDTNIRINLDSNTRSFIVPIITTEYIREKLSYSFYGSGGTYALSLSQYNMGINIELSESDVWIIDVDNVVRDVTIESDKIKKGDLIEGILSTLSIEENKIILNSHEINFSGEVNGSNGFVSLTFSILEGINAIIEVDLLSKSYKLLISGELKILMLNSNHIQQKIDYIGFNSELQKNIPYSFVDSEGKENGFINGSTKEGLFVSELPDVVLISKVYMDDSKPSFGYYSNNLKDVKVITKDNVNILTGYYLKDDIKISLSLTLQDEKTIKLNSVHLDESGVAEILKFMNRKGNTNTSDSLMSFLESMNIKSIFVNFLQSNIKFILDANFIISGTTSIGQFEFICDENDNIQPYFIKFNTLETNYTLYVGNRQNMIVEPNYDLDDSGDISSTVINFSQKYLYGIDSCVNKVVISPNIYTDEINITPVYETNNTYPEVIVLDANYINEKINVNINDLSIRYVWSNDGNDFILMSTSEENKVSQVKIRFVNVFKDKTLANKLSFNFSDKQDVPVSEIILSFTPSYYEDGLIGYDLGLVSLYNEKFYINNFGMMVS

SEQ ID NO: 241 - protein, 514 aa, Clostridium difficile
ITGFVTVGDDKYYFNPINGGAASIGETIIDDKNYYFNQSGVLQTGVFSTEDGFKYFAPANTLDENLEGEAIDFTGKLIIDENIYYFDDNYRGAVEWKELDGEMHYFSPETGKAFKGLNQIGDYKYYFNSDGVMQKGFVSINDNKHYFDDSGVMKVGYTEIDGKHFYFAENGEMQIGVFNTEDGFKYFAHHNEDLGNEEGEEISYSGILNFNNKIYYFDDSFTAVVGWKDLEDGSKYYFDEDTAEAYIGLSLINDGQYYFNDDGIMQVGFVTINDKVFYFSDSGIIESGVQNIDDNYFYIDDNGIVQIGVFDTSDGYKYFAPANTVNDNIYGQAVEYSGLVRVGEDVYYFGETYTIETGWIYDMENESDKYYFNPETKKACKGINLIDDIKYYFDEKGIMRTGLISFENNNYYFNENGEMQFGYINIEDKMFYFGEDGVMQIGVFNTPDGFKYFAHQNTLDENFEGESINYTGWLDLDEKRYYFTDEYIAATGSVIIDGEEYYFDPDTAQLVISE

SEQ ID NO: 242 - protein, 210 aa, Clostridium difficile
VQIGVFDTSDGYKYFAPANTVNDNIYGQAVEYSGLVRVGEDVYYFGETYTIETGWIYDMENESDKYYFNPETKKACKGINLIDDIKYYFDEKGIMRTGLISFENNNYYFNENGEMQFGYINIEDKMFYFGEDGVMQIGVFNTPDGFKYFAHQNTLDENFEGESINYTGWLDLDEKRYYFTDEYIAATGSVIIDGEEYYFDPDTAQLVISE

SEQ ID NO: 243 - protein, 311 aa, Clostridium difficile
YSGILNFNNKIYYFDDSFTAVVGWKDLEDGSKYYFDEDTAEAYIGLSLINDGQYYFNDDGIMQVGFVTINDKVFYFSDSGIIESGVQNIDDNYFYIDDNGIVQIGVFDTSDGYKYFAPANTVNDNIYGQAVEYSGLVRVGEDVYYFGETYTIETGWIYDMENESDKYYFNPETKKACKGINLIDDIKYYFDEKGIMRTGLISFENNNYYFNENGEMQFGYINIEDKMFYFGEDGVMQIGVFNTPDGFKYFAHQNTLDENFEGESINYTGWLDLDEKRYYFTDEYIAATGSVIIDGEEYYFDPDTAQLVISE

SEQ ID NO: 244 - protein, 768 aa, synthetic construct
  REGION 1..768: note = Synthetic amino acid sequence
SLISKEELIKLAYSIRPRENEYKTILTNLDEYNKLTTNNNENKYLQLKKLNESIDVFMNKYKTSSRNRALSNLKKDILKEVILIKNSNTSPVEKNLHFVWIGGEVSDIALEYIKQWADINAEYNIKLWYDSEAFLVNTLKKAIVESSTTEALQLLEEEIQNPQFDNMKFYKKRMEFIYDRQKRFINYYKSQINKPTVPTIDDIIKSHLVSEYNRDETVLESYRTNSLRKINSNHGIDIRANSLFTEQELLNIYSQELLNRGNLAAASDIVRLLALKNFGGVALAVAMLPGIHSDLFKTISRPSSIGLDRWEMIKLEAIMKYKKYINNYTSENFDKLDQQLKDNFKLIIESKSEKSEIFSKLENLNVSDLEIKIAFALGSVINQALISKQGSYLTNLVIEQVKNRYQFLNQHLNPAIESDNNFTDTTKIFHDSLFNSATAENSMFLTKIAPYLQVGFMPEARSTISLSGPGAYASAYYDFINLQENTIEKTLKASDLIEFKFPENNLSQLTEQEINSLWSFDQASAKYQFEKYVRDYTGGSLSEDNGVDFNKNTALDKNYLLNNKIPSNNVEEAGSKNYVHYIIQLQGDDISYEATCNLFSKNPKNSIIIQRNMNESAKSYFLSDDGESILELNKYRIPERLKNKEKVKVTFIGHGKDEFNTSEFARLSVDSLSNEISSFLDTIKLDISPKNVEVNLLGCNMFSYDFNVEETYPGKLLLSIMDKITSTLPDVNKNSITIGANQYEVRINSEGRKELLAHSGKWINKEEA

SEQ ID NO: 245 - protein, 540 aa, synthetic construct
  REGION 1..540: note = Synthetic amino acid sequence
SLISKEELIKLAYSIRPRENEYKTILTNLDEYNKLTTNNNENKYLQLKKLNESIDVFMNKYKTSSRNRALSNLKKDILKEVILIKNSNTSPVEKNLHFVWIGGEVSDIALEYIKQWADINAEYNIKLWYDSEAFLVNTLKKAIVESSTTEALQLLEEEIQNPQFDNMKFYKKRMEFIYDRQKRFINYYKSQINKPTVPTIDDIIKSHLVSEYNRDETVLESYRTNSLRKINSNHGIDIRANSLFTEQELLNIYSQELLNRGNLAAASDIVRLLALKNFGGVALAVAMLPGIHSDLFKTISRPSSIGLDRWEMIKLEAIMKYKKYINNYTSENFDKLDQQLKDNFKLIIESKSEKSEIFSKLENLNVSDLEIKIAFALGSVINQALISKQGSYLTNLVIEQVKNRYQFLNQHLNPAIESDNNFTDTTKIFHDSLFNSATAENSMFLTKIAPYLQVGFMPEARSTISLSGPGAYASAYYDFINLQENTIEKTLKASDLIEFKFPENNLSQLTEQEINSLWSFDQASAKYQFEKYVRDYTGGS

SEQ ID NO: 246 - protein, 766 aa, synthetic construct
  REGION 1..766: note = Synthetic amino acid sequence
SLVNRKQLEKMANVRFRTQEDEYVAILDALEEYHNMSENTVVEKYLKLKDINSLTDIYIDTYKKSGRNKALKKFKEYLVTEVLELKNNNLTPVEKNLHFVWIGGQINDTAINYINQWKDVNSDYNVNVFYDSNAFLINTLKKTVVESAINDTLESFRENLNDPRFDYNKFFRKRMEIIYDKQKNFINYYKAQREENPELIIDDIVKTYLSNEYSKEIDELNTYIEESLNKITQNSGNDVRNFEEFKNGESFNLYEQELVERWNLAAASAILAISALKEIGGMALAVAMLPGIQPDLFESIEKPSSVTVDFWEMTKLEAIMKYKEYIPEYTSEHFDMLDEEVQSSFESVLASKSDKSEIFSSLGDMEASPLEVKIAFNSKGIINQGLISVKDSYCSNLIVKQIENRYKILNNSLNPAISEDNDFNTTTNTFIDSIMAEANADNGRFMMELGKYLRVGFFPDVKTTINLSGPEAYAAAYQDLLMFKEGSMNIHLIEADLRNFEISKTNISQSTEQEMASLWSFDDARAKAQFEEYKRNYFEGSLGEDDNLDFSQNIVVDKEYLLEKISSLARSSERGYIHYIVQLQGNKISYEAACNLFAKTPYDSVLFQKNIEDSEIAYYYNPGDGEIQEIDKYKIPSIISDRPKIKLTFIGAGKDEFNTDIFAGFDVDSLSTEIEAAIDLAKEDISPKSIEINLLGANMFSYSINVEETYPGKLLLKVKDKISELMPSISQDSIIVSANQYEVRINSEGRRELLDHSGEWINKEES

SEQ ID NO: 247 - protein, 542 aa, synthetic construct
  REGION 1..542: note = Synthetic amino acid sequence
SLVNRKQLEKMANVRFRTQEDEYVAILDALEEYHNMSENTVVEKYLKLKDINSLTDIYIDTYKKSGRNKALKKFKEYLVTEVLELKNNNLTPVEKNLHFVWIGGQINDTAINYINQWKDVNSDYNVNVFYDSNAFLINTLKKTVVESAINDTLESFRENLNDPRFDYNKFFRKRMEIIYDKQKNFINYYKAQREENPELIIDDIVKTYLSNEYSKEIDELNTYIEESLNKITQNSGNDVRNFEEFKNGESFNLYEQELVERWNLAAASAILAISALKEIGGMALAVAMLPGIQPDLFESIEKPSSVTVDFWEMTKLEAIMKYKEYIPEYTSEHFDMLDEEVQSSFESVLASKSDKSEIFSSLGDMEASPLEVKIAFNSKGIINQGLISVKDSYCSNLIVKQIENRYKILNNSLNPAISEDNDFNTTTNTFIDSIMAEANADNGRFMMELGKYLRVGFFPDVKTTINLSGPEAYAAAYQDLLMFKEGSMNIHLIEADLRNFEISKTNISQSTEQEMASLWSFDDARAKAQFEEYKRNYFEGSL

SEQ ID NO: 248 - protein, 228 aa, synthetic construct
  REGION 1..228: note = Synthetic amino acid sequence
LSEDNGVDFNKNTALDKNYLLNNKIPSNNVEEAGSKNYVHYIIQLQGNDISYEATCNLFSKNPKNSIIIQRNMNESAKSYFLSDDGESILELNKYRIPERLKNKEKVKVTFIGAGKDEFNTSEFARLSVDSLSNEISSFLDTIKLDISPKNVEVNLLGANMFSYDFNVEETYPGKLLLSIMDKITSTLPDVNKNSITIGANQYEVRINSEGRKELLAHSGKWINKEEA

SEQ ID NO: 249 - protein, 224 aa, synthetic construct
  REGION 1..224: note = Synthetic amino acid sequence
GEDDNLDFSQNIVVDKEYLLEKISSLARSSERGYIHYIVQLQGNKISYEAACNLFAKTPYDSVLFQKNIEDSEIAYYYNPGDGEIQEIDKYKIPSIISDRPKIKLTFIGAGKDEFNTDIFAGFDVDSLSTEIEAAIDLAKEDISPKSIEINLLGANMFSYSINVEETYPGKLLLKVKDKISELMPSISQDSIIVSANQYEVRINSEGRRELLDHSGEWINKEES

SEQ ID NO: 250 - protein, 322 aa, synthetic construct
  REGION 1..322: note = Synthetic amino acid sequence
ASTGYTSINGKHFYFNTDGIMQIGVFKGPNGFEYFAPANTHNNNIEGQAILYQNKFLTLNGKKYYFGSDSKAVTGLRTIDGKKYYFNTNTAVAVTGWQTINGKKYYFNTNTSIASTGYTIISGKHFYFNTDGIMQIGVFKGPDGFEYFAPANTDANNIEGQAIRYQNRFLYLHDNIYYFGNNSKAATGWVTIDGNRYYFEPNTAMGANGYKTIDNKNFYFRNGLPQIGVFKGSNGFEYFAPANTDANNIEGQAIRYQNRFLHLLGKIYYFGNNSKAVTGWQTINGKVYYFMPDTAMAAAGGLFEIDGVIYFFGVDGVKAPLE

SEQ ID NO: 251 - protein, 320 aa, synthetic construct
  REGION 1..320: note = Synthetic amino acid sequence
ASTGYTSINGKHFYFNTDGIMQIGVFKGPNGFEYFAPANTDNNNIEGQAILYQNKFLTLNGKKYYFGSDSKAVTGLRTIDGKKYYFNTNTAVAVTGWQTINGKKYYFNTNTSIASTGYTIISGKHFYFNTDGIMQIGVFKGPDGFEYFAPANTDANNIEGQAIRYQNRFLYLHDNIYYFGNNSKAATGWVTIDGNRYYFEPNTAMGANGYKTIDNKNFYFRNGLPQIGVFKGSNGFEYFAPANTDANNIEGQAIRYQNRFLHLLGKIYYFGNNSKAVTGWQTINGKVYYFMPDTAMAAAGGLFEIDGVIYFFGVDGVKAP

SEQ ID NO: 252 - protein, 320 aa, synthetic construct
  REGION 1..320: note = Synthetic amino acid sequence
ASTGYTSINGKHFYFNTDGIMQIGVFKGPNGFEYFAPANTHANNIEGQAILYQNKFLTLNGKKYYFGSDSKAVTGLRTIDGKKYYFNTNTAVAVTGWQTINGKKYYFNTNTSIASTGYTIISGKHFYFNTDGIMQIGVFKGPDGFEYFAPANTDANNIEGQAIRYQNRFLYLHDNIYYFGNNSKAATGWVTIDGNRYYFEPNTAMGANGYKTIDNKNFYFRNGLPQIGVFKGSNGFEYFAPANTDANNIEGQAIRYQNRFLHLLGKIYYFGNNSKAVTGWQTINGKVYYFMPDTAMAAAGGLFEIDGVIYFFGVDGVKAP

SEQ ID NO: 253 - protein, 320 aa, synthetic construct; identical to SEQ ID NO: 185
  REGION 1..320: note = Synthetic amino acid sequence

SEQ ID NO: 254 - protein, 872 aa, Clostridium difficile
HMSLVNRKQLEKMANVRFRTQEDEYVAILDALEEYHNMSENTVVEKYLKLKDINSLTDIYIDTYKKSGRNKALKKFKEYLVTEVLELKNNNLTPVEKNLHFVWIGGQINDTAINYINQWKDVNSDYNVNVFYDSNAFLINTLKKTVVESAINDTLESFRENLNDPRFDYNKFFRKRMEIIYDKQKNFINYYKAQREENPELIIDDIVKTYLSNEYSKEIDELNTYIEESLNKITQNSGNDVRNFEEFKNGESFNLYEQELVERWNLAAASAILAISALKEIGGMALAVAMLPGIQPDLFESIEKPSSVTVDFWEMTKLEAIMKYKEYIPEYTSEHFDMLDEEVQSSFESVLASKSDKSEIFSSLGDMEASPLEVKIAFNSKGIINQGLISVKDSYCSNLIVKQIENRYKILNNSLNPAISEDNDFNTTTNTFIDSIMAEANADNGRFMMELGKYLRVGFFPDVKTTINLSGPEAYAAAYQDLLMFKEGSMNIHLIEADLRNFEISKTNISQSTEQEMASLWSFDDARAKAQFEEYKRNYFEGSLGSGGGGASTGYTSINGKHFYFNTDGIMQIGVFKGPNGFEYFAPANTHNNNIEGQAILYQNKFLTLNGKKYYFGSDSKAVTGLRTIDGKKYYFNTNTAVAVTGWQTINGKKYYFNTNTSIASTGYTIISGKHFYFNTDGIMQIGVFKGPDGFEYFAPANTDANNIEGQAIRYQNRFLYLHDNIYYFGNNSKAATGWVTIDGNRYYFEPNTAMGANGYKTIDNKNFYFRNGLPQIGVFKGSNGFEYFAPANTDANNIEGQAIRYQNRFLHLLGKIYYFGNNSKAVTGWQTINGKVYYFMPDTAMAAAGGLFEIDGVIYFFGVDGVKAPLE

SEQ ID NO: 255 - protein, 206 aa, synthetic construct
  REGION 1..206: note = Synthetic amino acid sequence
RYYFDTDTAIAFNGYKTIDGKHFYFDSDCVVKIGVFSTSNGFEYFAPANTYNNNIEGQAIVYQSKFLTLNGKKYYFDNNSKAVTGWQTIDSKKYYFNTNTAEAATGWQTIDGKKYYFNTNTAEAATGWQTIDGKKYYFNTNTAIASTGYTIINGKHFYFNTDGIMQIGVFKGPNGFEYFAPANTDANNIEGQAILYQNEFLTLNLE

SEQ ID NO: 256 - protein, 865 aa, synthetic construct
  REGION 1..865: note = Synthetic amino acid sequence
DPIEFNLVTGWQTINGKKYYFDINTGAALISYKIINGKHFYFNNDGVMQLGVFKGPDGFEYFAPANTQNNNIEGQAIVYQSKFLTLNGKKYYFDNDSKAVTGWRIINNEKYYFNPNNAIAAVGLQVIDNNKYYFNPDTAIISKGWQTVNGSRYYFDTDTAIAFNGYKTIDGKHFYFDSDCVVKIGVFSTSNGFEYFAPANTYNNNIEGQAIVYQSKFLTLNGKKYYFDNNSKAVTGWQTIDSKKYYFNTNTAEAATGWQTIDGKKYYFNTNTAEAATGWQTIDGKKYYFNTNTAIASTGYTIINGKHFYFNTDGIMQIGVFKGPNGFEYFAPANTDANNIEGQAILYQNEFLTLNGKKYYFGSDSKAVTGWRIINNKKYYFNPNNAIAAIHLCTINNDKYYFSYDGILQNGYITIERNNFYFDANNESKMVTGVFKGPNGFEYFAPANTHNNNIEGQAIVYQNKFLTLNGKKYYFDNDSKAVTGWQTIDGKKYYFNLNTAEAATGWQTIDGKKYYFNLNTAEAATGWQTIDGKKYYFNTNTFIASTGYTSINGKHFYFNTDGIMQIGVFKGPNGFEYFAPANTHNNNIEGQAILYQNKFLTLNGKKYYFGSDSKAVTGLRTIDGKKYYFNTNTAVAVTGWQTINGKKYYFNTNTSIASTGYTIISGKHFYFNTDGIMQIGVFKGPDGFEYFAPANTDANNIEGQAIRYQNRFLYLHDNIYYFGNNSKAATGWVTIDGNRYYFEPNTAMGANGYKTIDNKNFYFRNGLPQIGVFKGSNGFEYFAPANTDANNIEGQAIRYQNRFLHLLGKIYYFGNNSKAVTGWQTINGKVYYFMPDTAMAAAGGLFEIDGVIYFFGVDGVKAPLE

SEQ ID NO: 257 - protein, 459 aa, synthetic construct
  REGION 1..459: note = Synthetic amino acid sequence
ILQNGYITIERNNFYFDANNESKMVTGVFKGPNGFEYFAPANTHNNNIEGQAIVYQNKFLTLNGKKYYFDNDSKAVTGWQTIDGKKYYFNLNTAEAATGWQTIDGKKYYFNLNTAEAATGWQTIDGKKYYFNTNTFIASTGYTSINGKHFYFNTDGIMQIGVFKGPNGFEYFAPANTHNNNIEGQAILYQNKFLTLNGKKYYFGSDSKAVTGLRTIDGKKYYFNTNTAVAVTGWQTINGKKYYFNTNTSIASTGYTIISGKHFYFNTDGIMQIGVFKGPDGFEYFAPANTDANNIEGQAIRYQNRFLYLHDNIYYFGNNSKAATGWVTIDGNRYYFEPNTAMGANGYKTIDNKNFYFRNGLPQIGVFKGSNGFEYFAPANTDANNIEGQAIRYQNRFLHLLGKIYYFGNNSKAVTGWQTINGKVYYFMPDTAMAAAGGLFEIDGVIYFFGVDGVKAPLE

SEQ ID NO: 258 - protein, 888 aa, synthetic construct
  REGION 1..888: note = Synthetic amino acid sequence
GSSHHHHHHENLYFQGSLFYFDPIEFNLVTGWQTINGKKYYFDINTGAALISYKIINGKHFYFNNDGVMQLGVFKGPDGFEYFAPANTQNNNIEGQAIVYQSKFLTLNGKKYYFDNDSKAVTGWRIINNEKYYFNPNNAIAAVGLQVIDNNKYYFNPDTAIISKGWQTVNGSRYYFDTDTAIAFNGYKTIDGKHFYFDSDCVVKIGVFSTSNGFEYFAPANTYNNNIEGQAIVYQSKFLTLNGKKYYFDNNSKAVTGWQTIDSKKYYFNTNTAEAATGWQTIDGKKYYFNTNTAEAATGWQTIDGKKYYFNTNTAIASTGYTIINGKHFYFNTDGIMQIGVFKGPNGFEYFAPANTDANNIEGQAILYQNEFLTLNGKKYYFGSDSKAVTGWRIINNKKYYFNPNNAIAAIHLCTINNDKYYFSYDGILQNGYITIERNNFYFDANNESKMVTGVFKGPNGFEYFAPANTHNNNIEGQAIVYQNKFLTLNGKKYYFDNDSKAVTGWQTIDGKKYYFNLNTAEAATGWQTIDGKKYYFNLNTAEAATGWQTIDGKKYYFNTNTFIASTGYTSINGKHFYFNTDGIMQIGVFKGPNGFEYFAPANTHNNNIEGQAILYQNKFLTLNGKKYYFGSDSKAVTGLRTIDGKKYYFNTNTAVAVTGWQTINGKKYYFNTNTSIASTGYTIISGKHFYFNTDGIMQIGVFKGPDGFEYFAPANTDANNIEGQAIRYQNRFLYLHDNIYYFGNNSKAATGWVTIDGNRYYFEPNTAMGANGYKTIDNKNFYFRNGLPQIGVFKGSNGFEYFAPANTDANNIEGQAIRYQNRFLHLLGKIYYFGNNSKAVTGWQTINGKVYYFMPDTAMAAAGGLFEIDGVIYFFGVDGVKAPGIYG

SEQ ID NO: 259 - protein, 832 aa, synthetic construct
  REGION 1..832: note = Synthetic amino acid sequence
GSSHHHHHHENLYFQGMQLGVFKGPDGFEYFAPANTQNNNIEGQAIVYQSKFLTLNGKKYYFDNDSKAVTGWRIINNEKYYFNPNNAIAAVGLQVIDNNKYYFNPDTAIISKGWQTVNGSRYYFDTDTAIAFNGYKTIDGKHFYFDSDCVVKIGVFSTSNGFEYFAPANTYNNNIEGQAIVYQSKFLTLNGKKYYFDNNSKAVTGWQTIDSKKYYFNTNTAEAATGWQTIDGKKYYFNTNTAEAATGWQTIDGKKYYFNTNTAIASTGYTIINGKHFYFNTDGIMQIGVFKGPNGFEYFAPANTDANNIEGQAILYQNEFLTLNGKKYYFGSDSKAVTGWRIINNKKYYFNPNNAIAAIHLCTINNDKYYFSYDGILQNGYITIERNNFYFDANNESKMVTGVFKGPNGFEYFAPANTHNNNIEGQAIVYQNKFLTLNGKKYYFDNDSKAVTGWQTIDGKKYYFNLNTAEAATGWQTIDGKKYYFNLNTAEAATGWQTIDGKKYYFNTNTFIASTGYTSINGKHFYFNTDGIMQIGVFKGPNGFEYFAPANTHNNNIEGQAILYQNKFLTLNGKKYYFGSDSKAVTGLRTIDGKKYYFNTNTAVAVTGWQTINGKKYYFNTNTSIASTGYTIISGKHFYFNTDGIMQIGVFKGPDGFEYFAPANTDANNIEGQAIRYQNRFLYLHDNIYYFGNNSKAATGWVTIDGNRYYFEPNTAMGANGYKTIDNKNFYFRNGLPQIGVFKGSNGFEYFAPANTDANNIEGQAIRYQNRFLHLLGKIYYFGNNSKAVTGWQTINGKVYYFMPDTAMAAAGGLFEIDGVIYFFGVDGVKAP

SEQ ID NO: 260 - protein, 759 aa, synthetic construct
  REGION 1..759: note = Synthetic amino acid sequence
GSSHHHHHHENLYFQGAVGLQVIDNNKYYFNPDTAIISKGWQTVNGSRYYFDTDTAIAFNGYKTIDGKHFYFDSDCVVKIGVFSTSNGFEYFAPANTYNNNIEGQAIVYQSKFLTLNGKKYYFDNNSKAVTGWQTIDSKKYYFNTNTAEAATGWQTIDGKKYYFNTNTAEAATGWQTIDGKKYYFNTNTAIASTGYTIINGKHFYFNTDGIMQIGVFKGPNGFEYFAPANTDANNIEGQAILYQNEFLTLNGKKYYFGSDSKAVTGWRIINNKKYYFNPNNAIAAIHLCTINNDKYYFSYDGILQNGYITIERNNFYFDANNESKMVTGVFKGPNGFEYFAPANTHNNNIEGQAIVYQNKFLTLNGKKYYFDNDSKAVTGWQTIDGKKYYFNLNTAEAATGWQTIDGKKYYFNLNTAEAATGWQTIDGKKYYFNTNTFIASTGYTSINGKHFYFNTDGIMQIGVFKGPNGFEYFAPANTHNNNIEGQAILYQNKFLTLNGKKYYFGSDSKAVTGLRTIDGKKYYFNTNTAVAVTGWQTINGKKYYFNTNTSIASTGYTIISGKHFYFNTDGIMQIGVFKGPDGFEYFAPANTDANNIEGQAIRYQNRFLYLHDNIYYFGNNSKAATGWVTIDGNRYYFEPNTAMGANGYKTIDNKNFYFRNGLPQIGVFKGSNGFEYFAPANTDANNIEGQAIRYQNRFLHLLGKIYYFGNNSKAVTGWQTINGKVYYFMPDTAMAAAGGLFEIDGVIYFFGVDGVKAP

SEQ ID NO: 261 - protein, 419 aa, synthetic construct
  REGION 1..419: note = Synthetic amino acid sequence
GSSHHHHHHENLYFQGYQNKFLTLNGKKYYFDNDSKAVTGWQTIDGKKYYFNLNTAEAATGWQTIDGKKYYFNLNTAEAATGWQTIDGKKYYFNTNTFIASTGYTSINGKHFYFNTDGIMQIGVFKGPNGFEYFAPANTHNNNIEGQAILYQNKFLTLNGKKYYFGSDSKAVTGLRTIDGKKYYFNTNTAVAVTGWQTINGKKYYFNTNTSIASTGYTIISGKHFYFNTDGIMQIGVFKGPDGFEYFAPANTDANNIEGQAIRYQNRFLYLHDNIYYFGNNSKAATGWVTIDGNRYYFEPNTAMGANGYKTIDNKNFYFRNGLPQIGVFKGSNGFEYFAPANTDANNIEGQAIRYQNRFLHLLGKIYYFGNNSKAVTGWQTINGKVYYFMPDTAMAAAGGLFEIDGVIYFFGVDGVKAP

SEQ ID NO: 262 - protein, 244 aa, synthetic construct
  REGION 1..244: note = Synthetic amino acid sequence
GSSHHHHHHENLYFQGLSEDNGVDFNKNTALDKNYLLNNKIPSNNVEEAGSKNYVHYIIQLQGNDISYEATCNLFSKNPKNSIIIQRNMNESAKSYFLSDDGESILELNKYRIPERLKNKEKVKVTFIGAGKDEFNTSEFARLSVDSLSNEISSFLDTIKLDISPKNVEVNLLGANMFSYDFNVEETYPGKLLLSIMDKITSTLPDVNKNSITIGANQYEVRINSEGRKELLAHSGKWINKEEA

SEQ ID NO: 263 - protein, 281 aa, synthetic construct
  REGION 1..281: note = Synthetic amino acid sequence
GSSHHHHHHENLYFQGEDINVFMKDDINTITGKYYVDNNTDKSIDFSISLVSKNQVKVNGLYLNESVYSSYLDFVKNSDGHHNTSNFMNLFLDNISFWKLFGFENINFVIDKYFTLVGKTNLGYVEFICDNNKNIDIYFGEWKTSSSKSTIFSGNGRNVVVEPIYNPDTGEDISTSLDFSYEPLYGIDRYINKVLIAPDLYTSLININTNYYSNEYYPEIIVLNPNTFHKKVNINLDSSSFEYKWSTEGSDFILVRYLEESNKKILQKIRIKGILSNTQSF

SEQ ID NO: 264 - protein, 240 aa, synthetic construct
  REGION 1..240: note = Synthetic amino acid sequence
GSSHHHHHHENLYFQGGEDDNLDFSQNIVVDKEYLLEKISSLARSSERGYIHYIVQLQGNKISYEAACNLFAKTPYDSVLFQKNIEDSEIAYYYNPGDGEIQEIDKYKIPSIISDRPKIKLTFIGAGKDEFNTDIFAGFDVDSLSTEIEAAIDLAKEDISPKSIEINLLGANMFSYSINVEETYPGKLLLKVKDKISELMPSISQDSIIVSANQYEVRINSEGRRELLDHSGEWINKEES

SEQ ID NO: 265 - protein, 782 aa, synthetic construct
  REGION 1..782: note = Synthetic amino acid sequence
GSSHHHHHHENLYFQGSLVNRKQLEKMANVRFRTQEDEYVAILDALEEYHNMSENTVVEKYLKLKDINSLTDIYIDTYKKSGRNKALKKFKEYLVTEVLELKNNNLTPVEKNLHFVWIGGQINDTAINYINQWKDVNSDYNVNVFYDSNAFLINTLKKTVVESAINDTLESFRENLNDPRFDYNKFFRKRMEIIYDKQKNFINYYKAQREENPELIIDDIVKTYLSNEYSKEIDELNTYIEESLNKITQNSGNDVRNFEEFKNGESFNLYEQELVERWNLAAASAILAISALKEIGGMALAVAMLPGIQPDLFESIEKPSSVTVDFWEMTKLEAIMKYKEYIPEYTSEHFDMLDEEVQSSFESVLASKSDKSEIFSSLGDMEASPLEVKIAFNSKGIINQGLISVKDSYCSNLIVKQIENRYKILNNSLNPAISEDNDFNTTTNTFIDSIMAEANADNGRFMMELGKYLRVGFFPDVKTTINLSGPEAYAAAYQDLLMFKEGSMNIHLIEADLRNFEISKTNISQSTEQEMASLWSFDDARAKAQFEEYKRNYFEGSLGEDDNLDFSQNIVVDKEYLLEKISSLARSSERGYIHYIVQLQGNKISYEAACNLFAKTPYDSVLFQKNIEDSEIAYYYNPGDGEIQEIDKYKIPSIISDRPKIKLTFIGAGKDEFNTDIFAGFDVDSLSTEIEAAIDLAKEDISPKSIEINLLGANMFSYSINVEETYPGKLLLKVKDKISELMPSISQDSIIVSANQYEVRINSEGRRELLDHSGEWINKEES

SEQ ID NO: 266 - protein, 558 aa, synthetic construct
  REGION 1..558: note = Synthetic amino acid sequence
GSSHHHHHHENLYFQGSLVNRKQLEKMANVRFRTQEDEYVAILDALEEYHNMSENTVVEKYLKLKDINSLTDIYIDTYKKSGRNKALKKFKEYLVTEVLELKNNNLTPVEKNLHFVWIGGQINDTAINYINQWKDVNSDYNVNVFYDSNAFLINTLKKTVVESAINDTLESFRENLNDPRFDYNKFFRKRMEIIYDKQKNFINYYKAQREENPELIIDDIVKTYLSNEYSKEIDELNTYIEESLNKITQNSGNDVRNFEEFKNGESFNLYEQELVERWNLAAASAILAISALKEIGGMALAVAMLPGIQPDLFESIEKPSSVTVDFWEMTKLEAIMKYKEYIPEYTSEHFDMLDEEVQSSFESVLASKSDKSEIFSSLGDMEASPLEVKIAFNSKGIINQGLISVKDSYCSNLIVKQIENRYKILNNSLNPAISEDNDFNTTTNTFIDSIMAEANADNGRFMMELGKYLRVGFFPDVKTTINLSGPEAYAAAYQDLLMFKEGSMNIHLIEADLRNFEISKTNISQSTEQEMASLWSFDDARAKAQFEEYKRNYFEGSL

SEQ ID NO: 267 - protein, 532 aa, synthetic construct
  REGION 1..532: note = Synthetic amino acid sequence
GSSHHHHHHENLYFQGITGFVTVGDDKYYFNPINGGAASIGETIIDDKNYYFNQSGVLQTGVFSTEDGFKYFAPANTLDENLEGEAIDFTGKLIIDENIYYFDDNYRGAVEWKELDGEMHYFSPETGKAFKGLNQIGDYKYYFNSDGVMQKGFVSINDNKHYFDDSGVMKVGYTEIDGKHFYFAENGEMQIGVFNTEDGFKYFAHHNEDLGNEEGEEISYSGILNFNNKIYYFDDSFTAVVGWKDLEDGSKYYFDEDTAEAYIGLSLINDGQYYFNDDGIMQVGFVTINDKVFYFSDSGIIESGVQNIDDNYFYIDDNGIVQIGVFDTSDGYKYFAPANTVNDNIYGQAVEYSGLVRVGEDVYYFGETYTIETGWIYDMENESDKYYFNPETKKACKGINLIDDIKYYFDEKGIMRTGLISFENNNYYFNENGEMQFGYINIEDKMFYFGEDGVMQIGVFNTPDGFKYFAHQNTLDENFEGESINYTGWLDLDEKRYYFTDEYIAATGSVIIDGEEYYFDPDTAQLVISELE

SEQ ID NO: 268 - protein, 228 aa, synthetic construct
  REGION 1..228: note = Synthetic amino acid sequence
GSSHHHHHHENLYFQGVQIGVFDTSDGYKYFAPANTVNDNIYGQAVEYSGLVRVGEDVYYFGETYTIETGWIYDMENESDKYYFNPETKKACKGINLIDDIKYYFDEKGIMRTGLISFENNNYYFNENGEMQFGYINIEDKMFYFGEDGVMQIGVFNTPDGFKYFAHQNTLDENFEGESINYTGWLDLDEKRYYFTDEYIAATGSVIIDGEEYYFDPDTAQLVISELE

SEQ ID NO: 269 - protein, 304 aa, synthetic construct
  REGION 1..304: note = Synthetic amino acid sequence
GSSHHHHHHENLYFQGYSGILNFNNKIYYFDDSFTAVVGWKDLEDGSKYYFDEDTAEAYIGLSLINDGQYYFNDDGIMQVGFVTINDKVFYFSDSGIIESGVQNIDDNYFYIDDNGIVQIGVFDTSDGYKYFAPANTVNDNIYGQAVEYSGLVRVGEDVYYFGETYTIETGWIYDMENESDKYYFNPETKKACKGINLIDDIKYYFDEKGIMRTGLISFENNNYYFNENGEMQFGYINIEDKMFYFGEDGVMQIGVFNTPDGFKYFAHQNTLDENFEGESINYTGWLDLDEKRYYFTDEYIAAT

SEQ ID NO: 270 - protein, 360 aa, synthetic construct
  REGION 1..360: note = Synthetic amino acid sequence
RGSHHHHHHGMASMTGGQQMGRDLYDDDDKDRWGSSRITRASTGYTSINGKHFYFNTDGIMQIGVFKGPNGFEYFAPANTHNNNIEGQAILYQNKFLTLNGKKYYFGSDSKAVTGLRTIDGKKYYFNTNTAVAVTGWQTINGKKYYFNTNTSIASTGYTIISGKHFYFNTDGIMQIGVFKGPDGFEYFAPANTDANNIEGQAIRYQNRFLYLHDNIYYFGNNSKAATGWVTIDGNRYYFEPNTAMGANGYKTIDNKNFYFRNGLPQIGVFKGSNGFEYFAPANTDANNIEGQAIRYQNRFLHLLGKIYYFGNNSKAVTGWQTINGKVYYFMPDTAMAAAGGLFEIDGVIYFFGVDGVKAP

SEQ ID NO: 271 - protein, 329 aa, synthetic construct
  REGION 1..329: note = Synthetic amino acid sequence
  VARIANT 327: note = Xaa is any amino acid
ASTGYTSINGKHFYFNTDGIMQIGVFKGPNGFEYFAPANTHNNNIEGQAILYQNKFLTLNGKKYYFGSDSKAVTGLRTIDGKKYYFNTNTAVAVTGWQTINGKKYYFNTNTSIASTGYTIISGKHFYFNTDGIMQIGVFKGPDGFEYFAPANTDANNIEGQAIRYQNRFLYLHDNIYYFGNNSKAATGWVTIDGNRYYFEPNTAMGANGYKTIDNKNFYFRNGLPQIGVFKGSNGFEYFAPANTDANNIEGQAIRYQNRFLHLLGKIYYFGNNSKAVTGWQTINGKVYYFMPDTAMAAAGGLFEIDGVIYFFGVDGVKAPTESTCRXQA

SEQ ID NO: 272 - protein, 369 aa, synthetic construct
  REGION 1..369: note = Synthetic amino acid sequence
  VARIANT 367: note = Xaa is any amino acid.
  VARIANT 368: note = Xaa is any amino acid.
RGSHHHHHHGMASMTGGQQMGRDLYDDDDKDRWGSSRITRASTGYTSINGKHFYFNTDGIMQIGVFKGPNGFEYFAPANTHNNNIEGQAILYQNKFLTLNGKKYYFGSDSKAVTGLRTIDGKKYYFNTNTAVAVTGWQTINGKKYYFNTNTSIASTGYTIISGKHFYFNTDGIMQIGVFKGPDGFEYFAPANTDANNIEGQAIRYQNRFLYLHDNIYYFGNNSKAATGWVTIDGNRYYFEPNTAMGANGYKTIDNKNFYFRNGLPQIGVFKGSNGFEYFAPANTDANNIEGQAIRYQNRFLHLLGKIYYFGNNSKAVTGWQTINGKVYYFMPDTAMAAAGGLFEIDGVIYFFGVDGVKAPTESTCRXQA

SEQ ID NO: 273 - protein, 360 aa, synthetic construct
  REGION 1..360: note = Synthetic amino acid sequence
RGSHHHHHHGMASMTGGQQMGRDLYDDDDKDRWGSSRITRASTGYTSINGKHFYFNTDGIMQIGVFKGPNGFEYFAPANTDANNIEGQAILYQNKFLTLNGKKYYFGSDSKAVTGLRTIDGKKYYFNTNTAVAVTGWQTINGKKYYFNTNTSIASTGYTIISGKHFYFNTDGIMQIGVFKGPDGFEYFAPANTDANNIEGQAIRYQNRFLYLHDNIYYFGNNSKAATGWVTIDGNRYYFEPNTAMGANGYKTIDNKNFYFRNGLPQIGVFKGSNGFEYFAPANTDANNIEGQAIRYQNRFLHLLGKIYYFGNNSKAVTGWQTINGKVYYFMPDTAMAAAGGLFEIDGVIYFFGVDGVKAP

SEQ ID NO: 274 - protein, 329 aa, synthetic construct
  REGION 1..329: note = Synthetic amino acid sequence
  VARIANT 327: note = Xaa is any amino acid.
ASTGYTSINGKHFYFNTDGIMQIGVFKGPNGFEYFAPANTDANNIEGQAILYQNKFLTLNGKKYYFGSDSKAVTGLRTIDGKKYYFNTNTAVAVTGWQTINGKKYYFNTNTSIASTGYTIISGKHFYFNTDGIMQIGVFKGPDGFEYFAPANTDANNIEGQAIRYQNRFLYLHDNIYYFGNNSKAATGWVTIDGNRYYFEPNTAMGANGYKTIDNKNFYFRNGLPQIGVFKGSNGFEYFAPANTDANNIEGQAIRYQNRFLHLLGKIYYFGNNSKAVTGWQTINGKVYYFMPDTAMAAAGGLFEIDGVIYFFGVDGVKAPTESTCRXQA

SEQ ID NO: 275 - protein, 369 aa, synthetic construct
  REGION 1..369: note = Synthetic amino acid sequence
  VARIANT 367: note = Xaa is any amino acid
RGSHHHHHHGMASMTGGQQMGRDLYDDDDKDRWGSSRITRASTGYTSINGKHFYFNTDGIMQIGVFKGPNGFEYFAPANTDANNIEGQAILYQNKFLTLNGKKYYFGSDSKAVTGLRTIDGKKYYFNTNTAVAVTGWQTINGKKYYFNTNTSIASTGYTIISGKHFYFNTDGIMQIGVFKGPDGFEYFAPANTDANNIEGQAIRYQNRFLYLHDNIYYFGNNSKAATGWVTIDGNRYYFEPNTAMGANGYKTIDNKNFYFRNGLPQIGVFKGSNGFEYFAPANTDANNIEGQAIRYQNRFLHLLGKIYYFGNNSKAVTGWQTINGKVYYFMPDTAMAAAGGLFEIDGVIYFFGVDGVKAPTESTCRXQA

SEQ ID NO: 276 - protein, 2710 aa, synthetic construct
  REGION 1..2710: note = Synthetic amino acid sequence
MSLISKEELIKLAYSIRPRENEYKTILTNLDEYNKLTTNNNENKYLQLKKLNESIDVFMNKYKNSSRNRALSNLKKDILKEVILIKNSNTSPVEKNLHFVAIGGEVSDIALEYIKQWADINAEYNIKLWYDSEAFLVNTLKKAIVESSTTEALQLLEEEIQNPQFDNMKFYKKRMEFIYDRQKRFINYYKSQINKPTVPTIDDIIKSHLVSEYNRDETLLESYRTNSLRKINSNHGIDIRANSLFTEQELLNIYSQELLNRGNLAAASDIVRLLALKNFGGVYLDVAMLPGIHSDLFKTIPRPSSIGLDRWEMIKLEAIMKYKKYINNYTSENFDKLDQQLKDNFKLIIESKSEKSEIFSKLENLNVSDLEIKIAFALGSVINQALISKQGSYLTNLVIEQVKNRYQFLNQHLNPAIESDNNFTDTTKIFHDSLFNSATAENSMFLTKIAPYLQVGFMPEARSTISLSGPGAYASAYYDFINLQENTIEKTLKASDLIEFKFPENNLSQLTEQQINSLASFDQASAKYQFEKYVRDYTGGSLSEDNGVDFNKNTALDKNYLLNNKIPSNNVEEAGSKNYVHYIIQLQGDDISYEATCNLFSKNPKNSIIIQRNMNESAKSYFLSDDGESILELNKYRIPERLKNKEKVKVTFIGHGKDEFNTSEFARLSVDSLSNEISSFLDTIKLDISPKNVEVNLLGANMFSYDFNVEETYPGKLLLSIMDKITSTLPDVNKDSITIGANQYEVRINSEGRKELLAHSGKWINKEEAIMSDLSSKEYIFFDSIDNKLKAKSKNIPGLASISEDIKTLLLDASVSPDTKFILNNLKLNIESSIGDYIYYEKLEPVKNIIHNSIDDLIDEFNLLENVSDELYELKKLNNLDEKYLISFEDISKNNSTYSVRFINKSNGESVYVETEKEIFSKYSEHITKEISTIKNSIITDVNGNLLDNIQLDHTSQVNTLNAAFFIQSLIDYSSNKDVLNDLSTSVKVQLYAQLFSTGLNTIYDSIQLVNLISNAVNDTINVLPTITEGIPIVSTILDGINLGAAIKELLDEHDPLLKKELEAKVGVLAINMSLSIAATVASIVGIGAEVTIFLLPIAGISAGIPSLVNNELILHDKATSVVNYFNHLSESKEYGPLKTEDDKILVPIDDLVISEIDFNNNSIKLGTCNILAMEGGSGHTVTGNIDHFFSSPYISSHIPSLSVYSAIGIKTENLDFSKKIMMLPNAPSRVFWWETGAVPGLRSLENNGTKLLDSIRDLYPGKFYWRFYAFFDYAITTLKPVYEDTNTKIKLDKDTRNFIMPTITTDEIRNKLSYSFDGAGGTYSLLLSSYPISMNINLSKDDLWIFNIDNEVREISIENGTIKKGNLIEDVLSKIDINKNKLIIGNQTIDFSGDIDNKDRYIFLTCELDDKISLIIEINLVAKSYSLLLSGDKNYLISNLSNTIEKINTLGLDSKNIAYNYTDESNNKYFGAISKTSQKSIIHYKKDSKNILEFYNGSTLEFNSKDFIAEDINVFMKDDINTITGKYYVDNNTDKSIDFSISLVSKNQVKVNGLYLNESVYSSYLDFVKNSDGHHNTSNFMNLFLNNISFWKLFGFENINFVIDKYFTLVGKTNLGYVEFICDNNKNIDIYFGEWKTSSSKSTIFSGNGRNVVVEPIYNPDTGEDISTSLDFSYEPLYGIDRYINKVLIAPDLYTSLININTNYYSNEYYPEIIVLNPNTFHKKVNINLDSSSFEYKWSTEGSDFILVRYLEESNKKILQKIRIKGILSNTQSFNKMSIDFKDIKKLSLGYIMSNFKSFNSENELDRDHLGFKIIDNKTYYYDEDSKLVKGLININNSLFYFDPIESNLVTGWQTINGKKYYFDINTGAASTSYKIINGKHFYFNNNGVMQLGVFKGPDGFEYFAPANTQNNNIEGQAIVYQSKFLTLNGKKYYFDNDSKAVTGWRIINNEKYYFNPNNAIAAVGLQVIDNNKYYFNPDTAIISKGWQTVNGSRYYFDTDTAIAFNGYKTIDGKHFYFDSDCVVKIGVFSGSNGFEYFAPANTYNNNIEGQAIVYQSKFLTLNGKKYYFDNNSKAVTGWQTIDSKKYYFNTNTAEAATGWQTIDGKKYYFNTNTAEAATGWQTIDGKKYYFNTNTSIASTGYTIINGKYFYFNTDGIMQIGVFKVPNGFEYFAPANTHNNNIEGQAILYQNKFLTLNGKKYYFGSDSKAITGWQTIDGKKYYFNPNNAIAATHLCTINNDKYYFSYDGILQNGYITIERNNFYFDANNESKMVTGVFKGPNGFEYFAPANTHNNNIEGQAIVYQNKFLTLNGKKYYFDNDSKAVTGWQTIDSKKYYFNLNTAVAVTGWQTIDGEKYYFNLNTAEAATGWQTIDGKRYYFNTNTYIASTGYTIINGKHFYFNTDGIMQIGVFKGPDGFEYFAPANTHNNNIEGQAILYQNKFLTLNGKKYYFGSDSKAVTGLRTIDGKKYYFNTNTAVAVTGWQTINGKKYYFNTNTYIASTGYTIISGKHFYFNTDGIMQIGVFKGPDGFEYFAPANTDANNIEGQAIRYQNRFLYLHDNIYYFGNDSKAATGWATIDGNRYYFEPNTAMGANGYKTIDNKNFYFRNGLPQIGVFKGPNGFEYFAPANTDANNIDGQAIRYQNRFLHLLGKIYYFGNNSKAVTGWQTINSKVYYFMPDTAMAAAGGLFEIDGVIYFFGVDGVKAPGIYG

SEQ ID NO: 277 - protein, 2710 aa, synthetic construct
  REGION 1..2710: note = Synthetic amino acid sequence
MSLISKEELIKLAYSIRPRENEYKTILTNLDEYNKLTTNNNENKYLQLKKLNESIDVFMNKYKTSSRNRALSNLKKDILKEVILIKNSNTSPVEKNLHFVAIGGEVSDIALEYIKQWADINAEYNIKLWYDSEAFLVNTLKKAIVESSTTEALQLLEEEIQNPQFDNMKFYKKRMEFIYDRQKRFINYYKSQINKPTVPTIDDIIKSHLVSEYNRDETVLESYRTNSLRKINSNHGIDIRANSLFTEQELLNIYSQELLNRGNLAAASDIVRLLALKNFGGVYLDVAMLPGIHSDLFKTISRPSSIGLDRWEMIKLEAIMKYKKYINNYTSENFDKLDQQLKDNFKLIIESKSEKSEIFSKLENLNVSDLEIKIAFALGSVINQALISKQGSYLTNLVIEQVKNRYQFLNQHLNPAIESDNNFTDTTKIFHDSLFNSATAENSMFLTKIAPYLQVGFMPEARSTISLSGPGAYASAYYDFINLQENTIEKTLKASDLIEFKFPENNLSQLTEQQINSLASFDQASAKYQFEKYVRDYTGGSLSEDNGVDFNKNTALDKNYLLNNKIPSNNVEEAGSKNYVHYIIQLQGDDISYEATCNLFSKNPKNSIIIQRNMNESAKSYFLSDDGESILELNKYRIPERLKNKEKVKVTFIGHGKDEFNTSEFARLSVDSLSNEISSFLDTIKLDISPKNVEVNLLGANMFSYDFNVEETYPGKLLLSIMDKITSTLPDVNKNSITIGANQYEVRINSEGRKELLAHSGKWINKEEAIMSDLSSKEYIFFDSIDNKLKAKSKNIPGLASISEDIKTLLLDASVSPDTKFILNNLKLNIESSIGDYIYYEKLEPVKNIIHNSIDDLIDEFNLLENVSDELYELKKLNNLDEKYLISFEDISKNNSTYSVRFINKSNGESVYVETEKEIFSKYSEHITKEISTIKNSIITDVNGNLLDNIQLDHTSQVNTLNAAFFIQSLIDYSSNKDVLNDLSTSVKVQLYAQLFSTGLNTIYDSIQLVNLISNAVNDTINVLPTITEGIPIVSTILDGINLGAAIKELLDEHDPLLKKELEAKVGVLAINMSLSIAATVASIVGIGAEVTIFLLPIAGISAGIPSLVNNELILHDKATSVVNYFNHLSESKKYGPLKTEDDKILVPIDDLVISEIDFNNNSIKLGTCNILAMEGGSGHTVTGNIDHFFSSPSISSHIPSLSIYSAIGIETENLDFSKKIMMLPNAPSRVFWWETGAVPGLRSLENDGTRLLDSIRDLYPGKFYWRFYAFFDYAITTLKPVYEDTNIKIKLDKDTRNFIMPTITTNEIRNKLSYSFDGAGGTYSLLLSSYPISTNINLSKDDLWIFNIDNEVREISIENGTIKKGKLIKDVLSKIDINKNKLIIGNQTIDFSGDIDNKDRYIFLTCELDDKISLIIEINLVAKSYSLLLSGDKNYLISNLSNTIEKINTLGLDSKNIAYNYTDESNNKYFGAISKTSQKSIIHYKKDSKNILEFYNDSTLEFNSKDFIAEDINVFMKDDINTITGKYYVDNNTDKSIDFSISLVSKNQVKVNGLYLNESVYSSYLDFVKNSDGHHNTSNFMNLFLDNISFWKLFGFENINFVIDKYFTLVGKTNLGYVEFICDNNKNIDIYFGEWKTSSSKSTIFSGNGRNVVVEPIYNPDTGEDISTSLDFSYEPLYGIDRYINKVLIAPDLYTSLININTNYYSNEYYPEIIVLNPNTFHKKVNINLDSSSFEYKWSTEGSDFILVRYLEESNKKILQKIRIKGILSNTQSFNKMSIDFKDIKKLSLGYIMSNFKSFNSENELDRDHLGFKIIDNKTYYYDEDSKLVKGLININNSLFYFDPIEFNLVTGWQTINGKKYYFDINTGAALTSYKIINGKHFYFNNDGVMQLGVFKGPDGFEYFAPANTQNNNIEGQAIVYQSKFLTLNGKKYYFDNDSKAVTGWRIINNEKYYFNPNNAIAAVGLQVIDNNKYYFNPDTAIISKGWQTVNGSRYYFDTDTAIAFNGYKTIDGKHFYFDSDCVVKIGVFSTSNGFEYFAPANTYNNNIEGQAIVYQSKFLTLNGKKYYFDNNSKAVTGWQTIDSKKYYFNTNTAEAATGWQTIDGKKYYFNTNTAEAATGWQTIDGKKYYFNTNTAIASTGYTIINGKHFYFNTDGIMQIGVFKGPNGFEYFAPANTDANNIEGQAILYQNEFLTLNGKKYYFGSDSKAVTGWRIINNKKYYFNPNNAIAAIHLCTINNDKYYFSYDGILQNGYITIERNNFYFDANNESKMVTGVFKGPNGFEYFAPANTHNNNIEGQAIVYQNKFLTLNGKKYYFDNDSKAVTGWQTIDGKKYYFNLNTAEAATGWQTIDGKKYYFNLNTAEAATGWQTIDGKKYYFNTNTFIASTGYTSINGKHFYFNTDGIMQIGVFKGPNGFEYFAPANTHNNNIEGQAILYQNKFLTLNGKKYYFGSDSKAVTGLRTIDGKKYYFNTNTAVAVTGWQTINGKKYYFNTNTSIASTGYTIISGKHFYFNTDGIMQIGVFKGPDGFEYFAPANTDANNIEGQAIRYQNRFLYLHDNIYYFGNNSKAATGWVTIDGNRYYFEPNTAMGANGYKTIDNKNFYFRNGLPQIGVFKGSNGFEYFAPANTDANNIEGQAIRYQNRFLHLLGKIYYFGNNSKAVTGWQTINGKVYYFMPDTAMAAAGGLFEIDGVIYFFGVDGVKAPGIYG

SEQ ID NO: 278 - protein, 2710 aa, synthetic construct; identical to SEQ ID NO: 276
  REGION 1..2710: note = Synthetic amino acid sequence

SEQ ID NO: 279 - protein, 2710 aa, synthetic construct; identical to SEQ ID NO: 277
  REGION 1..2710: note = Synthetic amino acid sequence

SEQ ID NO: 280 - protein, 2710 aa, synthetic construct; identical to SEQ ID NO: 277
  REGION 1..2710: note = Synthetic amino acid sequence

SEQ ID NO: 281 - protein, 2710 aa, synthetic construct
  REGION 1..2710: note = Synthetic amino acid sequence
MSLISKEELIKLAYSIRPRENEYKTILTNLDEYNKLTTNNNENKYLQLKKLNESIDVFMNKYKTSSRNRALSNLKKDILKEVILIKNSNTSPVEKNLHFVAIGGEVSDIALEYIKQWADINAEYNIKLWYDSEAFLVNTLKKAIVESSTTEALQLLEEEIQNPQFDNMKFYKKRMEFIYDRQKRFINYYKSQINKPTVPTIDDIIKSHLVSEYNRDETVLESYRTNSLRKINSNHGIDIRANSLFTEQELLNIYSQELLNRGNLAAASDIVRLLALKNFGGVYLDVAMLPGIHSDLFKTISRPSSIGLDRWEMIKLEAIMKYKKYINNYTSENFDKLDQQLKDNFKLIIESKSEKSEIFSKLENLNVSDLEIKIAFALGSVINQALISKQGSYLTNLVIEQVKNRYQFLNQHLNPAIESDNNFTDTTKIFHDSLFNSATAENSMFLTKIAPYLQVGFMPEARSTISLSGPGAYASAYYDFINLQENTIEKTLKASDLIEFKFPENNLSQLTEQQINSLASFDQASAKYQFEKYVRDYTGGSLSEDNGVDFNKNTALDKNYLLNNKIPSNNVEEAGSKNYVHYIIQLQGDDISYEATCNLFSKNPKNSIIIQRNMNESAKSYFLSDDGESILELNKYRIPERLKNKEKVKVTFIGHGKDEFNTSEFARLSVDSLSNEISSFLDTIKLDISPKNVEVNLLGANMFSYDFNVEETYPGKLLLSIMDKITSTLPDVNKNSITIGANQYEVRINSEGRKELLAHSGKWINKEEAIMSDLSSKEYIFFDSIDNKLKAKSKNIPGLASISEDIKTLLLDASVSPDTKFILNNLKLNIESSIGDYIYYEKLEPVKNIIHNSIDDLIDEFNLLENVSDELYELKKLNNLDEKYLISFEDISKNNSTYSVRFINKSNGESVYVETEKEIFSKYSEHITKEISTIKNSIITDVNGNLLDNIQLDHTSQVNTLNAAFFIQSLIDYSSNKDVLNDLSTSVKVQLYAQLFSTGLNTIYDSIQLVNLISNAVNDTINVLPTITEGIPIVSTILDGINLGAAIKELLDEHDPLLKKELEAKVGVLAINMSLSIAATVASIVGIGAEVTIFLLPIAGISAGIPSLVNNELILHDKATSVVNYFNHLSESKKYGPLKTEDDKILVPIDDLVISEIDFNNNSIKLGTCNILAMEGGSGHTVTGNIDHFFSSPSISSHIPSLSIYSAIGIETENLDFSKKIMMLPNAPSRVFWWETGAVPGLRSLENDGTRLLDSIRDLYPGKFYWRFYAFFDYAITTLKPVYEDTNIKIKLDKDTRNFIMPTITTNEIRNKLSYSFDGAGGTYSLLLSSYPISTNINLSKDDLWIFNIDNEVREISIENGTIKKGKLIKDVLSKIDINKNKLIIGNQTIDFSGDIDNKDRYIFLTCELDDKISLIIEINLVAKSYSLLLSGDKNYLISNLSNTIEKINTLGLDSKNIAYNYTDESNNKYFGAISKTSQKSIIHYKKDSKNILEFYNDSTLEFNSKDFIAEDINVFMKDDVNTITGKYYVDNNTDKSIDFSISLVSKNQVKVNGLYLNESVYSSYLDFVKNSDGHHNTSNFMNLFLDNISFWKLFGFENINFVIDKYFTLVGKTNLGYVEFICDNNKNIDIYFGEWKTSSSKSTIFSGNGRNVVVEPIYNPDTGEDISTSLDFSYEPLYGIDRYINKVLIAPDLYTSLININTNYYSNEYYPEIIVLNPNTFHKKVNINLDSSSFEYKWSTEGSDFILVRYLEESNKKILQKIRIKGILSNTQSFNKMSIDFKDIKKLSLGYIMSNFKSFNSENELDRDHLGFKIIDNKTYYYDEDSKLVKGLININNSLFYFDPIEFNLVTGWQTINGKKYYFDINTGAALTSYKIINGKHFYFNNDGVMQLGVFKGPDGFEYFAPANTQNNNIEGQAIVYQSKFLTLNGKKYYFDNNSKAVTGWRIINNEKYYFNPNNAIAAVGLQVIDNNKYYFNPDTAIISKGWQTVNGSRYYFDTDTAIAFNGYKTIDGKHFYFDSDCVVKIGVFSTSNGFEYFAPANTYNNNIEGQAIVYQSKFLTLNGKKYYFDNNSKAVTGWQTIDSKKYYFNTNTAEAATGWQTIDGKKYYFNTNTAEAATGWQTIDGKKYYFNTNTAIASTGYTIINGKHFYFNTDGIMQIGVFKGPNGFEYFAPANTDANNIEGQAILYQNEFLTLNGKKYYFGSDSKAVTGWRIINNKKYYFNPNNAIAAIHLCTINNDKYYFSYDGILQNGYITIERNNFYFDANNESKMVTGVFKGPNGFEYFAPANTHNNNIEGQAIVYQNKFLTLNGKKYYFDNDSKAVTGWQTIDGKKYYFNLNTAEAATGWQTIDGKKYYFNLNTAEAATGWQTIDGKKYYFNTNTFIASTGYTSINGKHFYFNTDGIMQIGVFKGPNGFEYFAPANTDANNIEGQAILYQNKFLTLNGKKYYFGSDSKAVTGLRTIDGKKYYFNTNTAVAVTGWQTINGKKYYFNTNTSIASTGYTIISGKHFYFNTDGIMQIGVFKGPDGFEYFAPANTDANNIEGQAIRYQNRFLYLHDNIYYFGNNSKAATGWVTIDGNRYYFEPNTAMGANGYKTIDNKNFYFRNGLPQIGVFKGSNGFEYFAPANTDANNIEGQAIRYQNRFLHLLGKIYYFGNNSKAVTGWQTINGKVYYFMPDTAMAAAGGLFEIDGVIYFFGVDGVKAPGIYG

SEQ ID NO: 282 - protein, 2710 aa, synthetic construct
  REGION 1..2710: note = Synthetic amino acid sequence
MSLISKEELIKLAYSIRPRENEYKTILTNLDEYNKLTTNNNENKYLQLKKLNESIDVFMNKYKNSSRNRALSNLKKDILKEVILIKNSNTSPVEKNLHFVAIGGEVSDIALEYIKQWADINAEYNIKLWYDSEAFLVNTLKKAIVESSTTEALQLLEEEIQNPQFDNMKFYKKRMEFIYDRQKRFVNYYKSQINKPTVPTIDDIIKSHLVSEYNRDETLLESYRTNSLRKINSNHGIDIRANSLFTEQELLNIYSQELLNRGNLAAASDIVRLLALKNFGGVYLDVAMLPGIHSDLFKTISRPSSIGLDRWEMIKLEAIMKYKKYINNYTSENFDKLDQQLKDNFKLIIESKSEKSEIFSKLENLNVSDLEIKIAFALGSVINQALISKQGSYLTNLVIEQVKNRYQFLNQHLNPAIESDNNFTDTTKIFHDSLFNSATAENSMFLTKIAPYLQVGFMPEARSTISLSGPGAYASAYYDFINLQENTIEKTLKASDLIEFKFPENNLSQLTEQQINSLASFDQASAKYQFEKYVRDYTGGSLSEDNEVDFNKNTALDKNYLLNNKIPSNNVEEAGSKNYVHYIIQLQGDDISYEATCNLFSKNPKNSIIIQRNMNESAKSYFLSDDGESILELNKYRIPERLKNKEKVKVTFIGHGKDEFNTSEFARLSVDSLSNEISSFLDTIKLDISPKNVEVNLLGANMFSYDFNVEETYPGKLLLSIMDKITSTLPDVNKDSITIGANQYEVRINSEGRKELLAHSGKWINKEEAIMSDLSSKEYIFFDSIDNKLKAKSKNIPGLASISEDIKTLLLDTSVSPDTKFILNNLKLNIESSVGDYIYYEKLEPVKNIIHNSIDDLIDEFNLLENVSDELYELKKLNNLDEKYLISFEDISKNNSTYSVRFINKSNGESVYVETEKEIFSKYSEHITKEISTIKNSIITDVNGNLLDNIQLDHTSQVNTLNAAFFIQSLIDYSSNKDLLNDLSTSVKVQLYAQLFSTGLNTIYDSIQLVNLISNAVNDTINVLPTITEGIPIVSTILDGINLGAAIKELLDEHDPLLKKELEAKVGVLAINMSLSIAATVASIVGIGAEVTIFLLPIAGISAGIPSLVNNELILHDKATSVVNYFNHLSESKEYGPLKTEDDKILVPIDDLVISEIDFNNNAIKLGTCNILAMEGGSGHTVTGNIDHFFSSPSISSHIPSLSIYSAIGIKTENLDFSKKIMMLPNAPSRVFWWETGAVPGLRSLENNGTKLLDSIRDLYPGKFYWRFYAFFDYAITTLKPVYEDTNIKIKLDKDTRNFIMPTITTNEIRNKLSYSFDGAGGTYSLLLSSYPISTNINLSKDDLWIFNIDNEVREISIENGTIKKGKLIKDVLSKIDINKNKLIIGNQTIDFSGDIDNKDRYIFLTCELDDKISLIIEINLVAKSYSLLLSGDKNYLISNLSNTIEKINTLGLDSKNIAYNYTDESNNKYFGAISKTSQKSIIHYKKDSKNILEFYNGSTLEFNSKDFIAEDINVFMKDDINTITGKYYVDNNTDKSIDFSISLVSKNQAKVNGLYLNESVYSSYLDFVKNADGHHNTSNFMNLFLDNISFWKLFGFENINFVVDKYFTLVGKTNLGYVEFICDNNKNIDIYFGEWKTSSSKSTIFSGNGRNVVVEPIYNPDTGEDISTSLDFSYEPLYGIDRYINKVLIAPDLYTSLININTNYYSNEYYPEIIVLNPNTFHKKVNINLDSSSFEYKWSTEGSDFILVRYLEESNKKILQKIRIKGILSNTQSFNKMSIDFKDIKKLSLVYIMSNFKSFNSENELDRDHLGFKIIDNKTYYYDEASKLVKGLININNSLFYFDPIESNLVTGWQTINGKKYYFDINTGAALTSYKIINGKHFYFNNNGVMQLGVFKGPDRFEYFAPANTQNNNIEGQAIVYQSKFLTLNGKKYYFDNDSKAVTGWRIINNEKYYFNPNNAIAAVGLQVIDNNKYYFNPDTAIISKGWQTVNGSRYYFDTDTAIAFNGYKTIDGKHFYFDSDCVVKIGVFSGSNGFEYFAPANTYNNNIEGQAIVYQSKFLTLNGKKYYFDNNSKAVTGWQTIDSKKYYFNTNTAEAATGWQTIDGKKYYFNTNTAEVATGWQTIDGKKYYFNTNTSIASTGYTIINGKHFYFNTDGIMQIGVFKGPDGFEYFAPANTDANNIEGQAILYQNKFLTLNGKKYYFASDSKAVTGWRIINNKKYYFNPNNAIAATHLYTINNDKYYFSYDGILQNGYITIERNNFYFDANNESKMVTGVFKGPNGFEYFAPANTHNNNIEGQAIVYQNKFLTLNGKKYYFDNDSKAVTGWQTIDGKKYYFNLNTAVAVTGWQTIDGKKYYFNTNTAETATGWQTIDGKKYYFNTNTSIASTGYTIINGKHFYFNTDGIMQIGVFKGPDGFEYFAPANTDANNIEGQAILYQNKFLTLNGKKYYFASDSKAVTGLRTIDGKKYYFNTNTAEAATGWQTIDGKKYYFNTNTSIASTGYTIINDKHFYFNTDGIMQIGVFKGPDGFEYFAPANTDANNIEGQAIRYQNRFLYLHDNIYYFGNNSKAATGWVTIDGRRYYFEPNTAIGANGYKIIDNKNFYFRNGLPQIGVFKGPNGFEYFAPANTDANNIDGQAIRYQNRFLHLLGNIYYFGNNSKAVTGWQTINGNMYYFMPDTAMAAAGGLFEIDGVIYFFGVDGVKAPGIYG

SEQ ID NO: 283 - protein, 2710 aa, synthetic construct; identical to SEQ ID NO: 281
  REGION 1..2710: note = Synthetic amino acid sequence

SEQ ID NO: 284 - protein, 2710 aa, synthetic construct
  REGION 1..2710: note = Synthetic amino acid sequence
MSLISKEELIKLAYSIRPRENEYKTILTNLDEYNKLTTNNNENKYLQLKKLNESIDVFMNKYKNSSRNRALSNLKKDILKEVILIKNSNTSPVEKNLHFVAIGGEVSDIALEYIKQWADINAEYNIKLWYDSEAFLVNTLKKAIVESSTTEALQLLEEEIQNPQFDNMKFYKKRMEFIYDRQKRFVNYYKSQINKPTVPTIDDIIKSHLVSEYNRDETLLESYRTNSLRKINSNHGIDIRANSLFTEQELLNIYSQELLNRGNLAAASDIVRLLALKNFGGVYLDVAMLPGIHSDLFKTISRPSSIGLDRWEMIKLEAIMKYKKYINNYTSENFDKLDQQLKDNFKLIIESKSEKSEIFSKLENLNVSDLEIKIAFALGSVINQALISKQGSYLTNLVIEQVKNRYQFLNQHLNPAIESDNNFTDTTKIFHDSLFNSATAENSMFLTKIAPYLQVGFMPEARSTISLSGPGAYASAYYDFINLQENTIEKTLKASDLIEFKFPENNLSQLTEQQINSLASFDQASAKYQFEKYVRDYTGGSLSEDNEVDFNKNTALDKNYLLNNKIPSNNVEEAGSKNYVHYIIQLQGDDISYEATCNLFSKNPKNSIIIQRNMNESAKSYFLSDDGESILELNKYRIPERLKNKEKVKVTFIGHGKDEFNTSEFARLSVDSLSNEISSFLDTIKLDISPKNVEVNLLGANMFSYDFNVEETYPGKLLLSIMDKITSTLPDVNKDSITIGANQYEVRINSEGRKELLAHSGKWINKEEAIMSDLSSKEYIFFDSIDNKLKAKSKNIPGLASISEDIKTLLLDTSVSPDTKFILNNLKLNIESSVGDYIYYEKLEPVKNIIHNSIDDLIDEFNLLENVSDELYELKKLNNLDEKYLISFEDISKNNSTYSVRFINKSNGESVYVETEKEIFSKYSEHITKEISTIKNSIITDVNGNLLDNIQLDHTSQVNTLNAAFFIQSLIDYSSNKDLLNDLSTSVKVQLYAQLFSTGLNTIYDSIQLVNLISNAVNDTINVLPTITEGIPIVSTILDGINLGAAIKELLDEHDPLLKKELEAKVGVLAINMSLSIAATVASIVGIGAEVTIFLLPIAGISAGIPSLVNNELILHDKATSVVNYFNHLSESKEYGPLKTEDDKILVPIDDLVISEIDFNNNAIKLGTCNILAMEGGSGHTVTGNIDHFFSSPSISSHIPSLSIYSAIGIKTENLDFSKKIMMLPNAPSRVFWWETGAVPGLRSLENNGTKLLDSIRDLYPGKFYWRFYAFFDYAITTLKPVYEDTNIKIKLDKDTRNFIMPTITTNEIRNKLSYSFDGAGGTYSLLLSSYPISTNINLSKDDLWIFNIDNEVREISIENGTIKKGKLIKDVLSKIDINKNKLIIGNQTIDFSGDIDNKDRYIFLTCELDDKISLIIEINLVAKSYSLLLSGDKNYLISNLSNTIEKINTLGLDSKNIAYNYTDESNNKYFGAISKTSQKSIIHYKKDSKNILEFYNGSTLEFNSKDFIAEDINVFMKDDINTITGKYYVDNNTDKSIDFSISLVSKNQAKVNGLYLNESVYSSYLDFVKNADGHHNTSNFMNLFLDNISFWKLFGFENINFVVDKYFTLVGKTNLGYVEFICDNNKNIDIYFGEWKTSSSKSTIFSGNGRNVVVEPIYNPDTGEDISTSLDFSYEPLYGIDRYINKVLIAPDLYTSLININTNYYSNEYYPEIIVLNPNTFHKKVNINLDSSSFEYKWSTEGSDFILVRYLEESNKKILQKIRIKGILSNTQSFNKMSIDFKDIKKLSLVYIMSNFKSFNSENELDRDHLGFKIIDNKTYYYDEASKLVKGLININNSLFYFDPIESNLVTGWQTINGKKYYFDINTGAALTSYKIINGKHFYFNNNGVMQLGVFKGPDRFEYFAPANTQNNNIEGQAIVYQSKFLTLNGKKYYFDNDSKAVTGWRIINNEKYYFNPNNAIAAVGLQVIDNNKYYFNPDTAIISKGWQTVNGSRYYFDTDTAIAFNGYKTIDGKHFYFDSDCVVKIGVFSGSNGFEYFAPANTYNNNIEGQAIVYQSKFLTLNGKKYYFDNNSKAVTGWQTIDSKKYYFNTNTAEAATGWQTIDGKKYYFNTNTAEVATGWQTIDGKKYYFNTNTSIASTGYTIINGKHFYFNTDGIMQIGVFKGPDGFEYFAPANTDANNIEGQAILYQNKFLTLNGKKYYFASDSKAVTGWRIINNKKYYFNPNNAIAATHLYTINNDKYYFSYDGILQNGYITIERNNFYFDANNESKMVTGVFKGPNGFEYFAPANTHNNNIEGQAIVYQNKFLTLNGKKYYFDNDSKAVTGWQTIDGKKYYFNLNTAVAVTGWQTIDGKKYYFNTNTAEAATGWQTIDGKKYYFNTNTSIASTGYTIINGKHFYFNTDGIMQIGVFKGPDGFEYFAPANTDANNIEGQAILYQNKFLTLNGKKYYFASDSKAVTGLRTIDGKKYYFNTNTAEAATGWQTIDGKKYYFNTNTSIASTGYTIINDKHFYFNTDGIMQIGVFKGPDGFEYFAPANTDANNIEGQAIRYQNRFLYLHDNIYYFGNNSKAATGWVTIDGRRYYFEPNTAIGANGYKIIDNKNFYFRNGLPQIGVFKGPNGFEYFAPANTDANNIDGQAIRYQNRFLHLLGNIYYFGNNSKAVTGWQTINGNMYYFMPDTAMAAAGGLFEIDGVIYFFGVDGVKAPGIYG

SEQ ID NO: 285 - protein, 2709 aa, synthetic construct
  REGION 1..2709: note = Synthetic amino acid sequence
SLISKEELIKLAYSIRPRENEYKTILTNLDEYNKLTTNNNENKYLQLKKLNESIDVFMNKYKNSSRNRALSNLKKDILKEVILIKNSNTSPVEKNLHFVAIGGEVSDIALEYIKQWADINAEYNIKLWYDSEAFLVNTLKKAIVESSTTEALQLLEEEIQNPQFDNMKFYKKRMEFIYDRQKRFINYYKSQINKPTVPTIDDIIKSHLVSEYNRDETLLESYRTNSLRKINSNHGIDIRANSLFTEQELLNIYSQELLNRGNLAAASDIVRLLALKNFGGVYLDVAMLPGIHSDLFKTIPRPSSIGLDRWEMIKLEAIMKYKKYINNYTSENFDKLDQQLKDNFKLIIESKSEKSEIFSKLENLNVSDLEIKIAFALGSVINQALISKQGSYLTNLVIEQVKNRYQFLNQHLNPAIESDNNFTDTTKIFHDSLFNSATAENSMFLTKIAPYLQVGFMPEARSTISLSGPGAYASAYYDFINLQENTIEKTLKASDLIEFKFPENNLSQLTEQQINSLASFDQASAKYQFEKYVRDYTGGSLSEDNGVDFNKNTALDKNYLLNNKIPSNNVEEAGSKNYVHYIIQLQGDDISYEATCNLFSKNPKNSIIIQRNMNESAKSYFLSDDGESILELNKYRIPERLKNKEKVKVTFIGHGKDEFNTSEFARLSVDSLSNEISSFLDTIKLDISPKNVEVNLLGANMFSYDFNVEETYPGKLLLSIMDKITSTLPDVNKDSITIGANQYEVRINSEGRKELLAHSGKWINKEEAIMSDLSSKEYIFFDSIDNKLKAKSKNIPGLASISEDIKTLLLDASVSPDTKFILNNLKLNIESSIGDYIYYEKLEPVKNIIHNSIDDLIDEFNLLENVSDELYELKKLNNLDEKYLISFEDISKNNSTYSVRFINKSNGESVYVETEKEIFSKYSEHITKEISTIKNSIITDVNGNLLDNIQLDHTSQVNTLNAAFFIQSLIDYSSNKDVLNDLSTSVKVQLYAQLFSTGLNTIYDSIQLVNLISNAVNDTINVLPTITEGIPIVSTILDGINLGAAIKELLDEHDPLLKKELEAKVGVLAINMSLSIAATVASIVGIGAEVTIFLLPIAGISAGIPSLVNNELILHDKATSVVNYFNHLSESKEYGPLKTEDDKILVPIDDLVISEIDFNNNSIKLGTCNILAMEGGSGHTVTGNIDHFFSSPYISSHIPSLSVYSAIGIKTENLDFSKKIMMLPNAPSRVFWWETGAVPGLRSLENNGTKLLDSIRDLYPGKFYWRFYAFFDYAITTLKPVYEDTNTKIKLDKDTRNFIMPTITTDEIRNKLSYSFDGAGGTYSLLLSSYPISMNINLSKDDLWIFNIDNEVREISIENGTIKKGNLIEDVLSKIDINKNKLIIGNQTIDFSGDIDNKDRYIFLTCELDDKISLIIEINLVAKSYSLLLSGDKNYLISNLSNTIEKINTLGLDSKNIAYNYTDESNNKYFGAISKTSQKSIIHYKKDSKNILEFYNGSTLEFNSKDFIAEDINVFMKDDINTITGKYYVDNNTDKSIDFSISLVSKNQVKVNGLYLNESVYSSYLDFVKNSDGHHNTSNFMNLFLNNISFWKLFGFENINFVIDKYFTLVGKTNLGYVEFICDNNKNIDIYFGEWKTSSSKSTIFSGNGRNVVVEPIYNPDTGEDISTSLDFSYEPLYGIDRYINKVLIAPDLYTSLININTNYYSNEYYPEIIVLNPNTFHKKVNINLDSSSFEYKWSTEGSDFILVRYLEESNKKILQKIRIKGILSNTQSFNKMSIDFKDIKKLSLGYIMSNFKSFNSENELDRDHLGFKIIDNKTYYYDEDSKLVKGLININNSLFYFDPIESNLVTGWQTINGKKYYFDINTGAASTSYKIINGKHFYFNNNGVMQLGVFKGPDGFEYFAPANTQNNNIEGQAIVYQSKFLTLNGKKYYFDNDSKAVTGWRIINNEKYYFNPNNAIAAVGLQVIDNNKYYFNPDTAIISKGWQTVNGSRYYFDTDTAIAFNGYKTIDGKHFYFDSDCVVKIGVFSGSNGFEYFAPANTYNNNIEGQAIVYQSKFLTLNGKKYYFDNNSKAVTGWQTIDSKKYYFNTNTAEAATGWQTIDGKKYYFNTNTAEAATGWQTIDGKKYYFNTNTSIASTGYTIINGKYFYFNTDGIMQIGVFKVPNGFEYFAPANTHNNNIEGQAILYQNKFLTLNGKKYYFGSDSKAITGWQTIDGKKYYFNPNNAIAATHLCTINNDKYYFSYDGILQNGYITIERNNFYFDANNESKMVTGVFKGPNGFEYFAPANTHNNNIEGQAIVYQNKFLTLNGKKYYFDNDSKAVTGWQTIDSKKYYFNLNTAVAVTGWQTIDGEKYYFNLNTAEAATGWQTIDGKRYYFNTNTYIASTGYTIINGKHFYFNTDGIMQIGVFKGPDGFEYFAPANTHNNNIEGQAILYQNKFLTLNGKKYYFGSDSKAVTGLRTIDGKKYYFNTNTAVAVTGWQTINGKKYYFNTNTYIASTGYTIISGKHFYFNTDGIMQIGVFKGPDGFEYFAPANTDANNIEGQAIRYQNRFLYLHDNIYYFGNDSKAATGWATIDGNRYYFEPNTAMGANGYKTIDNKNFYFRNGLPQIGVFKGPNGFEYFAPANTDANNIDGQAIRYQNRFLHLLGKIYYFGNNSKAVTGWQTINSKVYYFMPDTAMAAAGGLFEIDGVIYFFGVDGVKAPGIYG

SEQ ID NO: 286 - protein, 2709 aa, synthetic construct
  REGION 1..2709: note = Synthetic amino acid sequence
SLISKEELIKLAYSIRPRENEYKTILTNLDEYNKLTTNNNENKYLQLKKLNESIDVFMNKYKTSSRNRALSNLKKDILKEVILIKNSNTSPVEKNLHFVAIGGEVSDIALEYIKQWADINAEYNIKLWYDSEAFLVNTLKKAIVESSTTEALQLLEEEIQNPQFDNMKFYKKRMEFIYDRQKRFINYYKSQINKPTVPTIDDIIKSHLVSEYNRDETVLESYRTNSLRKINSNHGIDIRANSLFTEQELLNIYSQELLNRGNLAAASDIVRLLALKNFGGVYLDVAMLPGIHSDLFKTISRPSSIGLDRWEMIKLEAIMKYKKYINNYTSENFDKLDQQLKDNFKLIIESKSEKSEIFSKLENLNVSDLEIKIAFALGSVINQALISKQGSYLTNLVIEQVKNRYQFLNQHLNPAIESDNNFTDTTKIFHDSLFNSATAENSMFLTKIAPYLQVGFMPEARSTISLSGPGAYASAYYDFINLQENTIEKTLKASDLIEFKFPENNLSQLTEQQINSLASFDQASAKYQFEKYVRDYTGGSLSEDNGVDFNKNTALDKNYLLNNKIPSNNVEEAGSKNYVHYIIQLQGDDISYEATCNLFSKNPKNSIIIQRNMNESAKSYFLSDDGESILELNKYRIPERLKNKEKVKVTFIGHGKDEFNTSEFARLSVDSLSNEISSFLDTIKLDISPKNVEVNLLGANMFSYDFNVEETYPGKLLLSIMDKITSTLPDVNKNSITIGANQYEVRINSEGRKELLAHSGKWINKEEAIMSDLSSKEYIFFDSIDNKLKAKSKNIPGLASISEDIKTLLLDASVSPDTKFILNNLKLNIESSIGDYIYYEKLEPVKNIIHNSIDDLIDEFNLLENVSDELYELKKLNNLDEKYLISFEDISKNNSTYSVRFINKSNGESVYVETEKEIFSKYSEHITKEISTIKNSIITDVNGNLLDNIQLDHTSQVNTLNAAFFIQSLIDYSSNKDVLNDLSTSVKVQLYAQLFSTGLNTIYDSIQLVNLISNAVNDTINVLPTITEGIPIVSTILDGINLGAAIKELLDEHDPLLKKELEAKVGVLAINMSLSIAATVASIVGIGAEVTIFLLPIAGISAGIPSLVNNELILHDKATSVVNYFNHLSESKKYGPLKTEDDKILVPIDDLVISEIDFNNNSIKLGTCNILAMEGGSGHTVTGNIDHFFSSPSISSHIPSLSIYSAIGIETENLDFSKKIMMLPNAPSRVFWWETGAVPGLRSLENNGTKLLDSIRDLYPGKFYWRFYAFFDYAITTLKPVYEDTNIKIKLDKDTRNFIMPTITTNEIRNKLSYSFDGAGGTYSLLLSSYPISTNINLSKDDLWIFNIDNEVREISIENGTIKKGKLIKDVLSKIDINKNKLIIGNQTIDFSGDIDNKDRYIFLTCELDDKISLIIEINLVAKSYSLLLSGDKNYLISNLSNTIEKINTLGLDSKNIAYNYTDESNNKYFGAISKTSQKSIIHYKKDSKNILEFYNGSTLEFNSKDFIAEDINVFMKDDINTITGKYYVDNNTDKSIDFSISLVSKNQVKVNGLYLNESVYSSYLDFVKNSDGHHNTSNFMNLFLDNISFWKLFGFENINFVIDKYFTLVGKTNLGYVEFICDNNKNIDIYFGEWKTSSSKSTIFSGNGRNVVVEPIYNPDTGEDISTSLDFSYEPLYGIDRYINKVLIAPDLYTSLININTNYYSNEYYPEIIVLNPNTFHKKVNINLDSSSFEYKWSTEGSDFILVRYLEESNKKILQKIRIKGILSNTQSFNKMSIDFKDIKKLSLGYIMSNFKSFNSENELDRDHLGFKIIDNKTYYYDEDSKLVKGLININNSLFYFDPIEFNLVTGWQTINGKKYYFDINTGAALTSYKIINGKHFYFNNDGVMQLGVFKGPDGFEYFAPANTQNNNIEGQAIVYQSKFLTLNGKKYYFDNDSKAVTGWRIINNEKYYFNPNNAIAAVGLQVIDNNKYYFNPDTAIISKGWQTVNGSRYYFDTDTAIAFNGYKTIDGKHFYFDSDCVVKIGVFSTSNGFEYFAPANTYNNNIEGQAIVYQSKFLTLNGKKYYFDDNSKAVTGWQTIDSKKYYFNTNTAEAATGWQTIDGKKYYFNTNTAEAATGWQTIDGKKYYFNTNTAIASTGYTIINGKHFYFNTDGIMQIGVFKGPNGFEYFAPANTDANNIEGQAILYQNEFLTLNGKKYYFGSDSKAVTGWRIINNKKYYFNPNNAIAAIHLCTINNDKYYFSYDGILQNGYITIERNNFYFDANNESKMVTGVFKGPNGFEYFAPANTYNNNIEGQAIVYQNKFLTLNGKKYYFDNDSKAVTGWQTIDGKKYYFNLNTAEAATGWQTIDGKKYYFNLNTAEAATGWQTIDGKKYYFNTNTFIASTGYTSINGKHFYFNTDGIMQIGVFKGPNGFEYFAPANTHNNNIEGQAILYQNKFLTLNGKKYYFGSDSKAVTGLRTIDGKKYYFNTNTAVAVTGWQTINGKKYYFNTNTSIASTGYTIISGKHFYFNTDGIMQIGVFKGPDGFEYFAPANTDANNIEGQAIRYQNRFLYLHDNIYYFGNNSKAATGWVTIDGNRYYFEPNTAMGANGYKTIDNKNFYFRNGLPQIGVFKGSNGFEYFAPANTDANNIEGQAIRYQNRFLHLLGKIYYFGNNSKAVTGWQTINGKVYYFMPDTAMAAAGGLFEIDGVIYFFGVDGVKAPGIYG

SEQ ID NO: 287 - protein, 2709 aa, synthetic construct
  REGION 1..2709: note = Synthetic amino acid sequence
SLISKEELIKLAYSIRPRENEYKTILTNLDEYNKLTTNNNENKYLQLKKLNESIDVFMNKYKTSSRNRALSNLKKDILKEVILIKNSNTSPVEKNLHFVAIGGEVSDIALEYIKQWADINAEYNIKLWYDSEAFLVNTLKKAIVESSTTEALQLLEEEIQNPQFDNMKFYKKRMEFIYDRQKRFINYYKSQINKPTVPTIDDIIKSHLVSEYNRDETVLESYRTNSLRKINSNHGIDIRANSLFTEQELLNIYSQELLNRGNLAAASDIVRLLALKNFGGVYLDVAMLPGIHSDLFKTISRPSSIGLDRWEMIKLEAIMKYKKYINNYTSENFDKLDQQLKDNFKLIIESKSEKSEIFSKLENLNVSDLEIKIAFALGSVINQALISKQGSYLTNLVIEQVKNRYQFLNQHLNPAIESDNNFTDTTKIFHDSLFNSATAENSMFLTKIAPYLQVGFMPEARSTISLSGPGAYASAYYDFINLQENTIEKTLKASDLIEFKFPENNLSQLTEQQINSLASFDQASAKYQFEKYVRDYTGGSLSEDNGVDFNKNTALDKNYLLNNKIPSNNVEEAGSKNYVHYIIQLQGDDISYEATCNLFSKNPKNSIIIQRNMNESAKSYFLSDDGESILELNKYRIPERLKNKEKVKVTFIGHGKDEFNTSEFARLSVDSLSNEISSFLDTIKLDISPKNVEVNLLGANMFSYDFNVEETYPGKLLLSIMDKITSTLPDVNKNSITIGANQYEVRINSEGRKELLAHSGKWINKEEAIMSDLSSKEYIFFDSIDNKLKAKSKNIPGLASISEDIKTLLLDASVSPDTKFILNNLKLNIESSIGDYIYYEKLEPVKNIIHNSIDDLIDEFNLLENVSDELYELKKLNNLDEKYLISFEDISKNNSTYSVRFINKSNGESVYVETEKEIFSKYSEHITKEISTIKNSIITDVNGNLLDNIQLDHTSQVNTLNAAFFIQSLIDYSSNKDVLNDLSTSVKVQLYAQLFSTGLNTIYDSIQLVNLISNAVNDTINVLPTITEGIPIVSTILDGINLGAAIKELLDEHDPLLKKELEAKVGVLAINMSLSIAATVASIVGIGAEVTIFLLPIAGISAGIPSLVNNELILHDKATSVVNYFNHLSESKKYGPLKTEDDKILVPIDDLVISEIDFNNNSIKLGTCNILAMEGGSGHTVTGNIDHFFSSPSISSHIPSLSIYSAIGIETENLDFSKKIMMLPNAPSRVFWWETGAVPGLRSLENDGTRLLDSIRDLYPGKFYWRFYAFFDYAITTLKPVYEDTNIKIKLDKDTRNFIMPTITTNEIRNKLSYSFDGAGGTYSLLLSSYPISTNINLSKDDLWIFNIDNEVREISIENGTIKKGKLIKDVLSKIDINKNKLIIGNQTIDFSGDIDNKDRYIFLTCELDDKISLIIEINLVAKSYSLLLSGDKNYLISNLSNTIEKINTLGLDSKNIAYNYTDESNNKYFGAISKTSQKSIIHYKKDSKNILEFYNDSTLEFNSKDFIAEDINVFMKDDINTITGKYYVDNNTDKSIDFSISLVSKNQVKVNGLYLNESVYSSYLDFVKNSDGHHNTSNFMNLFLDNISFWKLFGFENINFVIDKYFTLVGKTNLGYVEFICDNNKNIDIYFGEWKTSSSKSTIFSGNGRNVVVEPIYNPDTGEDISTSLDFSYEPLYGIDRYINKVLIAPDLYTSLININTNYYSNEYYPEIIVLNPNTFHKKVNINLDSSSFEYKWSTEGSDFILVRYLEESNKKILQKIRIKGILSNTQSFNKMSIDFKDIKKLSLGYIMSNFKSFNSENELDRDHLGFKIIDNKTYYYDEDSKLVKGLININNSLFYFDPIEFNLVTGWQTINGKKYYFDINTGAALTSYKIINGKHFYFNNDGVMQLGVFKGPDGFEYFAPANTQNNNIEGQAIVYQSKFLTLNGKKYYFDNNSKAVTGWRIINNEKYYFNPNNAIAAVGLQVIDNNKYYFNPDTAIISKGWQTVNGSRYYFDTDTAIAFNGYKTIDGKHFYFDSDCVVKIGVFSTSNGFEYFAPANTYNNNIEGQAIVYQSKFLTLNGKKYYFDNNSKAVTGWQTIDSKKYYFNTNTAEAATGWQTIDGKKYYFNTNTAEAATGWQTIDGKKYYFNTNTAIASTGYTIINGKHFYFNTDGIMQIGVFKGPNGFEYFAPANTDANNIEGQAILYQNEFLTLNGKKYYFGSDSKAVTGWRIINNKKYYFNPNNAIAAIHLCTINNDKYYFSYDGILQNGYITIERNNFYFDANNESKMVTGVFKGPNGFEYFAPANTHNNNIEGQAIVYQNKFLTLNGKKYYFDNDSKAVTGWQTIDGKKYYFNLNTAEAATGWQTIDGKKYYFNLNTAEAATGWQTIDGKKYYFNTNTFIASTGYTSINGKHFYFNTDGIMQIGVFKGPNGFEYFAPANTHNNNIEGQAILYQNKFLTLNGKKYYFGSDSKAVTGLRTIDGKKYYFNTNTAVAVTGWQTINGKKYYFNTNTSIASTGYTIISGKHFYFNTDGIMQIGVFKGPDGFEYFAPANTDANNIEGQAIRYQNRFLYLHDNIYYFGNNSKAATGWVTIDGNRYYFEPNTAMGANGYKTIDNKNFYFRNGLPQIGVFKGSNGFEYFAPANTDANNIEGQAIRYQNRFLHLLGKIYYFGNNSKAVTGWQTINGKVYYFMPDTAMAAAGGLFEIDGVIYFFGVDGVKAPGIYG

SEQ ID NO: 288 - protein, 2709 aa, synthetic construct
  REGION 1..2709: note = Synthetic amino acid sequence
SLISKEELIKLAYSIRPRENEYKTILTNLDEYNKLTTNNNENKYLQLKKLNESIDVFMNKYKNSSRNRALSNLKKDILKEVILIKNSNTSPVEKNLHFVAIGGEVSDIALEYIKQWADINAEYNIKLWYDSEAFLVNTLKKAIVESSTTEALQLLEEEIQNPQFDNMKFYKKRMEFIYDRQKRFVNYYKSQINKPTVPTIDDIIKSHLVSEYNRDETLLESYRTNSLRKINSNHGIDIRANSLFTEQELLNIYSQELLNRGNLAAASDIVRLLALKNFGGVYLDVAMLPGIHSDLFKTISRPSSIGLDRWEMIKLEAIMKYKKYINNYTSENFDKLDQQLKDNFKLIIESKSEKSEIFSKLENLNVSDLEIKIAFALGSVINQALISKQGSYLTNLVIEQVKNRYQFLNQHLNPAIESDNNFTDTTKIFHDSLFNSATAENSMFLTKIAPYLQVGFMPEARSTISLSGPGAYASAYYDFINLQENTIEKTLKASDLIEFKFPENNLSQLTEQQINSLASFDQASAKYQFEKYVRDYTGGSLSEDNEVDFNKNTALDKNYLLNNKIPSNNVEEAGSKNYVHYIIQLQGDDISYEATCNLFSKNPKNSIIIQRNMNESAKSYFLSDDGESILELNKYRIPERLKNKEKVKVTFIGHGKDEFNTSEFARLSVDSLSNEISSFLDTIKLDISPKNVEVNLLGANMFSYDFNVEETYPGKLLLSIMDKITSTLPDVNKDSITIGANQYEVRINSEGRKELLAHSGKWINKEEAIMSDLSSKEYIFFDSIDNKLKAKSKNIPGLASISEDIKTLLLDTSVSPDTKFILNNLKLNIESSVGDYIYYEKLEPVKNIIHNSIDDLIDEFNLLENVSDELYELKKLNNLDEKYLISFEDISKNNSTYSVRFINKSNGESVYVETEKEIFSKYSEHITKEISTIKNSIITDVNGNLLDNIQLDHTSQVNTLNAAFFIQSLIDYSSNKDLLNDLSTSVKVQLYAQLFSTGLNTIYDSIQLVNLISNAVNDTINVLPTITEGIPIVSTILDGINLGAAIKELLDEHDPLLKKELEAKVGVLAINMSLSIAATVASIVGIGAEVTIFLLPIAGISAGIPSLVNNELILHDKATSVVNYFNHLSESKEYGPLKTEDDKILVPIDDLVISEIDFNNNAIKLGTCNILAMEGGSGHTVTGNIDHFFSSPSISSHIPSLSIYSAIGIKTENLDFSKKIMMLPNAPSRVFWWETGAVPGLRSLENNGTKLLDSIRDLYPGKFYWRFYAFFDYAITTLKPVYEDTNIKIKLDKDTRNFIMPTITTNEIRNKLSYSFDGAGGTYSLLLSSYPISTNINLSKDDLWIFNIDNEVREISIENGTIKKGKLIKDVLSKIDINKNKLIIGNQTIDFSGDIDNKDRYIFLTCELDDKISLIIEINLVAKSYSLLLSGDKNYLISNLSNTIEKINTLGLDSKNIAYNYTDESNNKYFGAISKTSQKSIIHYKKDSKNILEFYNGSTLEFNSKDFIAEDINVFMKDDINTITGKYYVDNNTDKSIDFSISLVSKNQAKVNGLYLNESVYSSYLDFVKNADGHHNTSNFMNLFLDNISFWKLFGFENINFVVDKYFTLVGKTNLGYVEFICDNNKNIDIYFGEWKTSSSKSTIFSGNGRNVVVEPIYNPDTGEDISTSLDFSYEPLYGIDRYINKVLIAPDLYTSLININTNYYSNEYYPEIIVLNPNTFHKKVNINLDSSSFEYKWSTEGSDFILVRYLEESNKKILQKIRIKGILSNTQSFNKMSIDFKDIKKLSLVYIMSNFKSFNSENELDRDHLGFKIIDNKTYYYDEASKLVKGLININNSLFYFDPIESNLVTGWQTINGKKYYFDINTGAALTSYKIINGKHFYFNNNGVMQLGVFKGPDRFEYFAPANTQNNNIEGQAIVYQSKFLTLNGKKYYFDNDSKAVTGWRIINNEKYYFNPNNAIAAVGLQVIDNNKYYFNPDTAIISKGWQTVNGSRYYFDTDTAIAFNGYKTIDGKHFYFDSDCVVKIGVFSGSNGFEYFAPANTYNNNIEGQAIVYQSKFLTLNGKKYYFDNNSKAVTGWQTIDSKKYYFNTNTAEAATGWQTIDGKKYYFNTNTAEVATGWQTIDGKKYYFNTNTSIASTGYTIINGKHFYFNTDGIMQIGVFKGPDGFEYFAPANTDANNIEGQAILYQNKFLTLNGKKYYFASDSKAVTGWRIINNKKYYFNPNNAIAATHLYTINNDKYYFSYDGILQNGYITIERNNFYFDANNESKMVTGVFKGPNGFEYFAPANTHNNNIEGQAIVYQNKFLTLNGKKYYFDNDSKAVTGWQTIDGKKYYFNLNTAVAVTGWQTIDGKKYYFNTNTAEAATGWQTIDGKKYYFNTNTSIASTGYTIINGKHFYFNTDGIMQIGVFKGPDGFEYFAPANTDANNIEGQAILYQNKFLTLNGKKYYFASDSKAVTGLRTIDGKKYYFNTNTAEAATGWQTIDGKKYYFNTNTSIASTGYTIINDKHFYFNTDGIMQIGVFKGPDGFEYFAPANTDANNIEGQAIRYQNRFLYLHDNIYYFGNNSKAATGWVTIDGRRYYFEPNTAIGANGYKIIDNKNFYFRNGLPQIGVFKGPNGFEYFAPANTDANNIDGQAIRYQNRFLHLLGNIYYFGNNSKAVTGWQTINGNMYYFMPDTAMAAAGGLFEIDGVIYFFGVDGVKAPGIYG

SEQ ID NO: 289 - protein, 2709 aa, synthetic construct
  REGION 1..2709: note = Synthetic amino acid sequence
SLISKEELIKLAYSIRPRENEYKTILTNLDEYNKLTTNNNENKYLQLKKLNESIDVFMNKYKTSSRNRALSNLKKDILKEVILIKNSNTSPVEKNLHFVAIGGEVSDIALEYIKQWADINAEYNIKLWYDSEAFLVNTLKKAIVESSTTEALQLLEEEIQNPQFDNMKFYKKRMEFIYDRQKRFINYYKSQINKPTVPTIDDIIKSHLVSEYNRDETVLESYRTNSLRKINSNHGIDIRANSLFTEQELLNIYSQELLNRGNLAAASDIVRLLALKNFGGVYLDVAMLPGIHSDLFKTISRPSSIGLDRWEMIKLEAIMKYKKYINNYTSENFDKLDQQLKDNFKLIIESKSEKSEIFSKLENLNVSDLEIKIAFALGSVINQALISKQGSYLTNLVIEQVKNRYQFLNQHLNPAIESDNNFTDTTKIFHDSLFNSATAENSMFLTKIAPYLQVGFMPEARSTISLSGPGAYASAYYDFINLQENTIEKTLKASDLIEFKFPENNLSQLTEQQINSLASFDQASAKYQFEKYVRDYTGGSLSEDNGVDFNKNTALDKNYLLNNKIPSNNVEEAGSKNYVHYIIQLQGDDISYEATCNLFSKNPKNSIIIQRNMNESAKSYFLSDDGESILELNKYRIPERLKNKEKVKVTFIGHGKDEFNTSEFARLSVDSLSNEISSFLDTIKLDISPKNVEVNLLGANMFSYDFNVEETYPGKLLLSIMDKITSTLPDVNKNSITIGANQYEVRINSEGRKELLAHSGKWINKEEAIMSDLSSKEYIFFDSIDNKLKAKSKNIPGLASISEDIKTLLLDASVSPDTKFILNNLKLNIESSIGDYIYYEKLEPVKNIIHNSIDDLIDEFNLLENVSDELYELKKLNNLDEKYLISFEDISKNNSTYSVRFINKSNGESVYVETEKEIFSKYSEHITKEISTIKNSIITDVNGNLLDNIQLDHTSQVNTLNAAFFIQSLIDYSSNKDVLNDLSTSVKVQLYAQLFSTGLNTIYDSIQLVNLISNAVNDTINVLPTITEGIPIVSTILDGINLGAAIKELLDEHDPLLKKELEAKVGVLAINMSLSIAATVASIVGIGAEVTIFLLPIAGISAGIPSLVNNELILHDKATSVVNYFNHLSESKKYGPLKTEDDKILVPIDDLVISEIDFNNNSIKLGTCNILAMEGGSGHTVTGNIDHFFSSPSISSHIPSLSIYSAIGIETENLDFSKKIMMLPNAPSRVFWWETGAVPGLRSLENDGTRLLDSIRDLYPGKFYWRFYAFFDYAITTLKPVYEDTNIKIKLDKDTRNFIMPTITTNEIRNKLSYSFDGAGGTYSLLLSSYPISTNINLSKDDLWIFNIDNEVREISIENGTIKKGKLIKDVLSKIDINKNKLIIGNQTIDFSGDIDNKDRYIFLTCELDDKISLIIEINLVAKSYSLLLSGDKNYLISNLSNTIEKINTLGLDSKNIAYNYTDESNNKYFGAISKTSQKSIIHYKKDSKNILEFYNDSTLEFNSKDFIAEDINVFMKDDINTITGKYYVDNNTDKSIDFSISLVSKNQVKVNGLYLNESVYSSYLDFVKNSDGHHNTSNFMNLFLDNISFWKLFGFENINFVIDKYFTLVGKTNLGYVEFICDNNKNIDIYFGEWKTSSSKSTIFSGNGRNVVVEPIYNPDTGEDISTSLDFSYEPLYGIDRYINKVLIAPDLYTSLININTNYYSNEYYPEIIVLNPNTFHKKVNINLDSSSFEYKWSTEGSDFILVRYLEESNKKILQKIRIKGILSNTQSFNKMSIDFKDIKKLSLGYIMSNFKSFNSENELDRDHLGFKIIDNKTYYYDEDSKLVKGLININNSLFYFDPIEFNLVTGWQTINGKKYYFDINTGAALTSYKIINGKHFYFNNDGVMQLGVFKGPDGFEYFAPANTQNNNIEGQAIVYQSKFLTLNGKKYYFDNDSKAVTGWRIINNEKYYFNPNNAIAAVGLQVIDNNKYYFNPDTAIISKGWQTVNGSRYYFDTDTAIAFNGYKTIDGKHFYFDSDCVVKIGVFSTSNGFEYFAPANTYNNNIEGQAIVYQSKFLTLNGKKYYFDNNSKAVTGWQTIDSKKYYFNTNTAEAATGWQTIDGKKYYFNTNTAEAATGWQTIDGKKYYFNTNTAIASTGYTIINGKHFYFNTDGIMKIGVFKGPNGFEYFAPANTDANNIEGQAILYQNEFLTLNGKKYYFGSDSKAVTGWRIINNKKYYFNPNNAIAAIHLCTINNDKYYFSYDGILQNGYITIERNNFYFDANNESKMVTGVFKGPNGFEYFAPANTYNNNIEGQAIVYQNKFLTLNGKKYYFDNDSKAVTGWQTIDGKKYYFNLNTAEAATGWQTIDGKKYYFNLNTAEAATGWQTIDGKKYYFNTNTFIASTGYTSINGKHFYFNTDGIMQIGVFKGPNGFEYFAPANTHNNNIEGQAILYQNKFLTLNGKKYYFGSDSKAVTGLRTIDGKKYYFNTNTAVAVTGWQTINGKKYYFNTNTSIASTGYTIISGKHFYFNTDGIMQIGVFKGPDGFEYFAPANTDANNIEGQAIRYQNRFLYLHDNIYYFGNNSKAATGWVTIDGNRYYFEPNTAMGANGYKTIDNKNFYFRNGLPQIGVFKGSNGFEYFAPANTDANNIEGQAIRYQNRFLHLLGKIYYFGNNSKAVTGWQTINGKVYYFMPDTAMAAAGGLFEIDGVIYFFGVDGVKAPGIYG

SEQ ID NO: 290 - protein, 2709 aa, synthetic construct; identical to SEQ ID NO: 288
  REGION 1..2709: note = Synthetic amino acid sequence

SEQ ID NO: 291 - protein, 2709 aa, synthetic construct
  REGION 1..2709: note = Synthetic amino acid sequence
SLISKEELIKLAYSIRPRENEYKTILTNLDEYNKLTTNNNENKYLQLKKLNESIDVFMNKYKNSSRNRALSNLKKDILKEVILIKNSNTSPVEKNLHFVAIGGEVSDIALEYIKQWADINAEYNIKLWYDSEAFLVNTLKKAIVESSTTEALQLLEEEIQNPQFDNTKFYKKRMEFIYDRQKRFINYYKSQINKPTVPTIDDIIKSHLVSEYNRDETLLESYRTNSLRKINSNHGIDIRANSLFTEQELLNIYSQELLNRGNLAAASDIVRLLALKNFGGVYLDVAMLPGIHSDLFKTISRPSSIGLDRWEMIKLEAIMKYKKYINNYTSENFDKLDQQLKDNFKLIIESKSEKSEIFSKLENLNVSDLEIKIAFALGSVINQALISKQGSYLTNLVIEQVKNRYQFLNQHLNPAIESDNNFTDTTKIFHDSLFNSATAENSMFLTKIAPYLQVGFMPEARSTISLSGPGAYASAYYDFINLQENTIEKTLKASDLIEFKFPENNLSQLTEQQINSLASFDQASAKYQFEKYVRDYTGGSLSEDNGVDFNKNTALDKNYLLNNKIPSNNVEEAGSKNYVHYIIQLQGDDISYEATCNLFSKNPKNSIIIQRNMNESAKSYFLSDDGESILELNKYRIPERLKNKEKVKVTFIGHGKDEFNTSEFARLSVDSLSNEISSFLDTIKLDISPKNVEVNLLGANMFSYDFNVEETYPGKLLLSIMDKITSTLPDVNKDSITIGANQYEVRINSEGRKELLAHSGKWINKEEAIMSDLSSKEYIFFDSIDNKLKAKSKNIPGLASISEDIKTLLLDASVSPDTKFILNNLKLNIESSIGDYIYYEKLEPVKNIIHNSIDDLIDEFNLLENVSDELYELKKLNNLDEKYLISFEDISKNNSTYSVRFINKSNGESVYVETEKEIFSKYSEHITKEISTIKNSIITDVNGNLLDNIQLDHTSQVNTLNAAFFIQSLIDYSSNKDVLNDLSTSVKVQLYAQLFSTGLNTIYDSIQLVNLISNAVNDTINVLPTITEGIPIVSTILDGINLGAAIKELLDEHDPLLKKELEAKVGVLAINMSLSIAATVASIVGIGAEVTIFLLPIAGISAGIPSLVNNELILHDKATSVVNYFNHLSESKKYGPLKTEDDKILVPIDDLVISEIDFNNNSIKLGTCNILAMEGGSGHTVTGNIDHFFSSPYISSHIPSLSVYSAIGIKTENLDFSKKIMMLPNAPSRVFWWETGAVPGLRSLENDGTKLLDSIRDLYPGKFYWRFYAFFDYAITTLKPVYEDTNTKIKLDKDTRNFIMPTITTDEIRNKLSYSFDGAGGTYSLLLSSYPISMNINLSKDDLWIFNIDNEVREISIENGTIKKGNLIEDVLSKIDINKNKLIIGNQTIDFSGDIDNKDRYIFLTCELDDKISLIIEINLVAKSYSLLLSGDKNYLISNLSNTIEKINTLGLDSKNIAYNYTDESNNKYFGAISKTSQKSIIHYKKDSKNILEFYNGSTLEFNSKDFIAEDINVFMKDDINTITGKYYVDNNTDKSIDFSISLVSKNQVKVNGLYLNESVYSSYLDFVKNSDGHHNTSNFMNLFLNNISFWKLFGFENINFVIDKYFTLVGKTNLGYVEFICDNNKNIDIYFGEWKTLSSKSTIFSGNGRNVVVEPIYNPDTGEDISTSLDFSYEPLYGIDRYINKVLIAPDLYTSLININTNYYSNEYYPEIIVLNPNTFHKKVNINLDSSSFEYKWSTEGSDFILVRYLEESNKKILQKIRIKGILSNTQSFNKMSIDFKDIKKLSLGYIMSNFKSFNSENELDRDHLGFKIIDNKTYYYDEDSKLVKGLININNSLFYFDPIESNLVTGWQTINGKKYYFDINTGAASTSYKIINGKHFYFNNNGVMQLGVFKGPDGFEYFAPANTQNNNIEGQAIVYQSKFLTLNGKKYYFDNDSKAVTGWRIINNEKYYFNPNNAIAAVGLQVIDNNKYYFNPDTAIISKGWQTVNGSRYYFDTDTAIAFNGYKTIDGKHFYFDSDCVVKIGVFSGSNGFEYFAPANTYNNNIEGQAIVYQSKFLTLNGKKYYFDNNSKAVTGWQTIDSKKYYFNTNTAEAATGWQTIDGKKYYFNTNTAEAATGWQTIDGKKYYFNTNTSIASTGYTIINGKHFYFNTDGIMQIGVFKGPNGFEYFAPANTDANNIEGQAILYQNKFLTLNGKKYYFGSDSKAITGWQTIDGKKYYFNPNNAIAATHLCTINNDKYYFSYDGILQNGYITIERNNFYFDANNESKMVTGVFKGPNGFEYFAPANTHNNNIEGQAIVYQNKFLTLNGKKYYFDNDSKAVTGWQTIDSKKYYFNLNTAVAVTGWQTIDGEKYYFNLNTAEAATGWQTIDGKRYYFNTNTYIASTGYTIINGKHFYFNTDGIMQIGVFKGPDGFEYFAPANTHNNNIEGQAILYQNKFLTLNGKKYYFGSDSKAVTGLRTIDGKKYYFNTNTAVAVTGWQTINGKKYYFNTNTYIASTGYTIISGKHFYFNTDGIMQIGVFKGPDGFEYFAPANTDANNIEGQAIRYQNRFLYLHDNIYYFGNDSKAATGWATIDGNRYYFEPNTAMGANGYKTIDNKNFYFRNGLPQIGVFKGPNGFEYFAPANTDANNIDGQAIRYQNRFLHLLGNIYYFGNNSKAVTGWQTINGKVYYFMPDTAMAAAGGLFEIDGVIYFFGVDGVKAPGIYG

SEQ ID NO: 292 - protein, 2709 aa, synthetic construct; identical to SEQ ID NO: 291
  REGION 1..2709: note = Synthetic amino acid sequence

SEQ ID NO: 293 - protein, 2709 aa, synthetic construct; identical to SEQ ID NO: 291
  REGION 1..2709: note = Synthetic amino acid sequence

SEQ ID NO: 294 - protein, 2709 aa, synthetic construct
  REGION 1..2709: note = Synthetic amino acid sequence
SLISKEELIKLAYSIRPRENEYKTILTNLDEYNKLTTNNNENKYLQLKKLNESIDVFMNKYKTSSRNRALSNLKKDILKEVILIKNSNTSPVEKNLHFVAIGGEVSDIALEYIKQWADINAEYNIKLWYDSEAFLVNTLKKAIVESSTTEALQLLEEEIQNPQFDNMKFYKKRMEFIYDRQKRFINYYKSQINKPTVPTIDDIIKSHLVSEYNRDETVLESYRTNSLRKINSNHGIDIRANSLFTEQELLNIYSQELLNRGNLAAASDIVRLLALKNFGGVYLDVAMLPGIHSDLFKTISRPSSIGLDRWEMIKLEAIMKYKKYINNYTSENFDKLDQQLKDNFKLIIESKSEKSEIFSKLENLNVSDLEIKIAFALGSVINQALISKQGSYLTNLVIEQVKNRYQFLNQHLNPAIESDNNFTDTTKIFHDSLFNSATAENSMFLTKIAPYLQVGFMPEARSTISLSGPGAYASAYYDFINLQENTIEKTLKASDLIEFKFPENNLSQLTEQQINSLASFDQASAKYQFEKYVRDYTGGSLSEDNGVDFNKNTALDKNYLLNNKIPSNNVEEAGSKNYVHYIIQLQGDDISYEATCNLFSKNPKNSIIIQRNMNESAKSYFLSDDGESILELNKYRIPERLKNKEKVKVTFIGHGKDEFNTSEFARLSVDSLSNEISSFLDTIKLDISPKNVEVNLLGANMFSYDFNVEETYPGKLLLSIMDKITSTLPDVNKNSITIGANQYEVRINSEGRKELLAHSGKWINKEEAIMSDLSSKEYIFFDSIDNKLKAKSKNIPGLASISEDIKTLLLDASVSPDTKFILNNLKLNIESSIGDYIYYEKLEPVKNIIHNSIDDLIDEFNLLENVSDELYELKKLNNLDEKYLISFEDISKNNSTYSVRFINKSNGESVYVETEKEIFSKYSEHITKEISTIKNSIITDVNGNLLDNIQLDHTSQVNTLNAAFFIQSLIDYSSNKDVLNDLSTSVKVQLYAQLFSTGLNTIYDSIQLVNLISNAVNDTINVLPTITEGIPIVSTILDGINLGAAIKELLDEHDPLLKKELEAKVGVLAINMSLSIAATVASIVGIGAEVTIFLLPIAGISAGIPSLVNNELILHDKATSVVNYFNHLSESKKYGPLKTEDDKILVPIDDLVISEIDFNNNSIKLGTCNILAMEGGSGHTVTGNIDHFFSSPSISSHIPSLSIYSAIGIETENLDFSKKIMMLPNAPSRVFWWETGAVPGLRSLENDGTRLLDSIRDLYPGKFYWRFYAFFDYAITTLKPVYEDTNIKIKLDKDTRNFIMPTITTNEIRNKLSYSFDGAGGTYSLLLSSYPISTNINLSKDDLWIFNIDNEVREISIENGTIKKGKLIKDVLSKIDINKNKLIIGNQTIDFSGDIDNKDRYIFLTCELDDKISLIIEINLVAKSYSLLLSGDKNYLISNLSNTIEKINTLGLDSKNIAYNYTDESNNKYFGAISKTSQKSIIHYKKDSKNILEFYNDSTLEFNSKDFIAEDINVFMKDDINTITGKYYVDNNTDKSIDFSISLVSKNQVKVNGLYLNESVYSSYLDFVKNSDGHHNTSNFMNLFLDNISFWKLFGFENINFVIDKYFTLVGKTNLGYVEFICDNNKNIDIYFGEWKTSSSKSTIFSGNGRNVVVEPIYNPDTGEDISTSLDFSYEPLYGIDRYINKVLIAPDLYTSLININTNYYSNEYYPEIIVLNPNTFHKKVNINLDSSSFEYKWSTEGSDFILVRYLEESNKKILQKIRIKGILSNTQSFNKMSIDFKDIKKLSLGYIMSNFKSFNSENELDRDHLGFKIIDNKTYYYDEDSKLVKGLININNSLFYFDPIEFNLVTGWQTINGKKYYFDINTGAALTSYKIINGKHFYFNNDGVMQLGVFKGPDGFEYFAPANTQNNNIEGQAIVYQSKFLTLNGKKYYFDNDSKAVTGWRIINNEKYYFNPNNAIAAVGLQVIDNNKYYFNPDTAIISKGWQTVNGSRYYFDTDTAIAFNGYKTIDGKHFYFDSDCVVKIGVFSTSNGFEYFAPANTYNNNIEGQAIVYQSKFLTLNGKKYYFDNNSKAVTGWQTIDSKKYYFNTNTAEAATGWQTIDGKKYYFNTNTAEAATGWQTIDGKKYYFNTNTAIASTGYTIINGKHFYFNTDGIMQIGVFKGPNGFEYFAPANTDANNIEGQAILYQNEFLTLNGKKYYFGSDSKAVTGWRIINNKKYYFNPNNAIAAIHLCTINNDKYYFSYDGILQNGYITIERNNFYFDANNESKMVTGVFKGPNGFEYFAPANTHNNNIEGQAIVYQNKFLTLNGKKYYFDNDSKAVTGWQTIDGKKYYFNLNTAEAATGWQTIDGKKYYFNLNTAEAATGWQTIDGKKYYFNTNTFIASTGYTSINGKHFYFNTDGIMQIGVFKGPNGFEYFAPANTHNNNIEGQAILYQNKFLTLNGKKYYFGSDSKAVTGLRTIDGKKYYFNTNTAVAVTGWQTINGKKYYFNTNTSIASTGYTIISGKHFYFNTDGIMQIGVFKGPDGFEYFAPANTDANNIEGQAIRYQNRFLYLHDNIYYFGNNSKAATGWVTIDGNRYYFEPNTAMGANGYKTIDNKNFYFRNGLPQIGVFKGSNGFEYFAPANTDANNIEGQAIRYQNRFLHLLGKIYYFGNNSKAVTGWQTINGKVYYFMPDTAMAAAGGLFEIDGVIYFFGVDGVKAPGIYG

SEQ ID NO: 295 - protein, 2709 aa, synthetic construct
  REGION 1..2709: note = Synthetic amino acid sequence
SLISKEELIKLAYSIRPRENEYKTILTNLDEYNKLTTNNNENKYLQLKKLNESIDVFMNKYKTSSRNRALSNLKKDILKEVILIKNSNTSPVEKNLHFVAIGGEVSDIALEYIKQWADINAEYNIKLWYDSEAFLVNTLKKAIVESSTTEALQLLEEEIQNPQFDNMKFYKKRMEFIYDRQKRFINYYKSQINKPTVPTIDDIIKSHLVSEYNRDETVLESYRTNSLRKINSNHGIDIRANSLFTEQELLNIYSQELLNRGNLAAASDIVRLLALKNFGGVYLDVAMLPGIHSDLFKTISRPSSIGLDRWEMIKLEAIMKYKKYINNYTSENFDKLDQQLKDNFKLIIESKSEKSEIFSKLENLNVSDLEIKIAFALGSVINQALISKQGSYLTNLVIEQVKNRYQFLNQHLNPAIESDNNFTDTTKIFHDSLFNSATAENSMFLTKIAPYLQVGFMPEARSTISLSGPGAYASAYYDFINLQENTIEKTLKASDLIEFKFPENNLSQLTEQQINSLASFDQASAKYQFEKYVRDYTGGSLSEDNGVDFNKNTALDKNYLLNNKIPSNNVEEAGSKNYVHYIIQLQGDDISYEATCNLFSKNPKNSIIIQRNMNESAKSYFLSDDGESILELNKYRIPERLKNKEKVKVTFIGHGKDEFNTSEFARLSVDSLSNEISSFLDTIKLDISPKNVEVNLLGANMFSYDFNVEETYPGKLLLSIMDKITSTLPDVNKNSITIGANQYEVRINSEGRKELLAHSGKWINKEEAIMSDLSSKEYIFFDSIDNKLKAKSKNIPGLASISEDIKTLLLDASVSPDTKFILNNLKLNIESSIGDYIYYEKLEPVKNIIHNSIDDLIDEFNLLENVSDELYELKKLNNLDEKYLISFEDISKNNSTYSVRFINKSNGESVYVETEKEIFSKYSEHITKEISTIKNSIITDVNGNLLDNIQLDHTSQVNTLNAAFFIQSLIDYSSNKDVLNDLSTSVKVQLYAQLFSTGLNTIYDSIQLVNLISNAVNDTINVLPTITEGIPIVSTILDGINLGAAIKELLDEHDPLLKKELEAKVGVLAINMSLSIAATVASIVGIGAEVTIFLLPIAGISAGIPSLVNNELILHDKATSVVNYFNHLSESKKYGPLKTEDDKILVPIDDLVISEIDFNNNSIKLGTCNILAMEGGSGHTVTGNIDHFFSSPSISSHIPSLSIYSAIGIETENLDFSKKIMMLPNAPSRVFWWETGAVPGLRSLENDGTRLLDSIRDLYPGKFYWRFYAFFDYAITTLKPVYEDTNIKIKLDKDTRNFIMPTITTNEIRNKLSYSFDGAGGTYSLLLSSYPISTNINLSKDDLWIFNIDNEVREISIENGTIKKGKLIKDVLSKIDINKNKLIIGNQTIDFSGDIDNKDRYIFLTCELDDKISLIIEINLVAKSYSLLLSGDKNYLISNLSNTIEKINTLGLDSKNIAYNYTDESNNKYFGAISKTSQKSIIHYKKDSKNILEFYNDSTLEFNSKDFIAEDINVFMKDDVNTITGKYYVDNNTDKSIDFSISLVSKNQVKVNGLYLNESVYSSYLDFVKNSDGHHNTSNFMNLFLDNISFWKLFGFENINFVIDKYFTLVGKTNLGYVEFICDNNKNIDIYFGEWKTSSSKSTIFSGNGRNVVVEPIYNPDTGEDISTSLDFSYEPLYGIDRYINKVLIAPDLYTSLININTNYYSNEYYPEIIVLNPNTFHKKVNINLDSSSFEYKWSTEGSDFILVRYLEESNKKILQKIRIKGILSNTQSFNKMSIDFKDIKKLSLGYIMSNFKSFNSENELDRDHLGFKIIDNKTYYYDEDSKLVKGLININNSLFYFDPIEFNLVTGWQTINGKKYYFDINTGAALTSYKIINGKHFYFNNDGVMQLGVFKGPDGFEYFAPANTQNNNIEGQAIVYQSKFLTLNGKKYYFDNNSKAVTGWRIINNEKYYFNPNNAIAAVGLQVIDNNKYYFNPDTAIISKGWQTVNGSRYYFDTDTAIAFNGYKTIDGKHFYFDSDCVVKIGVFSTSNGFEYFAPANTYNNNIEGQAIVYQSKFLTLNGKKYYFDNNSKAVTGWQTIDSKKYYFNTNTAEAATGWQTIDGKKYYFNTNTAEAATGWQTIDGKKYYFNTNTAIASTGYTIINGKHFYFNTDGIMQIGVFKGPNGFEYFAPANTDANNIEGQAILYQNEFLTLNGKKYYFGSDSKAVTGWRIINNKKYYFNPNNAIAAIHLCTINNDKYYFSYDGILQNGYITIERNNFYFDANNESKMVTGVFKGPNGFEYFAPANTHNNNIEGQAIVYQNKFLTLNGKKYYFDNDSKAVTGWQTIDGKKYYFNLNTAEAATGWQTIDGKKYYFNLNTAEAATGWQTIDGKKYYFNTNTFIASTGYTSINGKHFYFNTDGIMQIGVFKGPNGFEYFAPANTDANNIEGQAILYQNKFLTLNGKKYYFGSDSKAVTGLRTIDGKKYYFNTNTAVAVTGWQTINGKKYYFNTNTSIASTGYTIISGKHFYFNTDGIMQIGVFKGPDGFEYFAPANTDANNIEGQAIRYQNRFLYLHDNIYYFGNNSKAATGWVTIDGNRYYFEPNTAMGANGYKTIDNKNFYFRNGLPQIGVFKGSNGFEYFAPANTDANNIEGQAIRYQNRFLHLLGKIYYFGNNSKAVTGWQTINGKVYYFMPDTAMAAAGGLFEIDGVIYFFGVDGVKAPGIYG

SEQ ID NO: 296 - protein, 2709 aa, synthetic construct
  REGION 1..2709: note = Synthetic amino acid sequence
SLISKEELIKLAYSIRPRENEYKTILTNLDEYNKLTTNNNENKYLQLKKLNESIDVFMNKYKTSSRNRALSNLKKDILKEVILIKNSNTSPVEKNLHFVAIGGEVSDIALEYIKQWADINAEYNIKLWYDSEAFLVNTLKKAIVESSTTEALQLLEEEIQNPQFDNMKFYKKRMEFIYDRQKRFINYYKSQINKPTVPTIDDIIKSHLVSEYNRDETVLESYRTNSLRKINSNHGIDIRANSLFTEQELLNIYSQELLNRGNLAAASDIVRLLALKNFGGVYLDVAMLPGIHSDLFKTISRPSSIGLDRWEMIKLEAIMKYKKYINNYTSENFDKLDQQLKDNFKLIIESKSEKSEIFSKLENLNVSDLEIKIAFALGSVINQALISKQGSYLTNLVIEQVKNRYQFLNQHLNPAIESDNNFTDTTKIFHDSLFNSATAENSMFLTKIAPYLQVGFMPEARSTISLSGPGAYASAYYDFINLQENTIEKTLKASDLIEFKFPENNLSQLTEQQINSLASFDQASAKYQFEKYVRDYTGGSLSEDNGVDFNKNTALDKNYLLNNKIPSNNVEEAGSKNYVHYIIQLQGDDISYEATCNLFSKNPKNSIIIQRNMNESAKSYFLSDDGESILELNKYRIPERLKNKEKVKVTFIGHGKDEFNTSEFARLSVDSLSNEISSFLDTIKLDISPKNVEVNLLGANMFSYDFNVEETYPGKLLLSIMDKITSTLPDVNKNSITIGANQYEVRINSEGRKELLAHSGKWINKEEAIMSDLSSKEYIFFDSIDNKLKAKSKNIPGLASISEDIKTLLLDASVSPDTKFILNNLKLNIESSIGDYIYYEKLEPVKNIIHNSIDDLIDEFNLLENVSDELYELKKLNNLDEKYLISFEDISKNNSTYSVRFINKSNGESVYVETEKEIFSKYSEHITKEISTIKNSIITDVNGNLLDNIQLDHTSQVNTLNAAFFIQSLIDYSSNKDVLNDLSTSVKVQLYAQLFSTGLNTIYDSIQLVNLISNAVNDTINVLPTITEGIPIVSTILDGINLGAAIKELLDEHDPLLKKELEAKVGVLAINMSLSIAATVASIVGIGAEVTIFLLPIAGISAGIPSLVNNELILHDKATSVVNYFNHLSESKKYGPLKTEDDKILVPIDDLVISEIDFNNNSIKLGTCNILAMEGGSGHTVTGNIDHFFSSPSISSHIPSLSIYSAIGIETENLDFSKKIMMLPNAPSRVFWWETGAVPGLRSLENDGTRLLDSIRDLYPGKFYWRFYAFFDYAITTLKPVYEDTNIKIKLDKDTRNFIMPTITTNEIRNKLSYSFDGAGGTYSLLLSSYPISTNINLSKDDLWIFNIDNEVREISIENGTIKKGKLIKDVLSKIDINKNKLIIGNQTIDFSGDIDNKDRYIFLTCELDDKISLIIEINLVAKSYSLLLSGDKNYLISNLSNTIEKINTLGLDSKNIAYNYTDESNNKYFGAISKTSQKSIIHYKKDSKNILEFYNDSTLEFNSKDFIAEDINVFMKDDINTITGKYYVDNNTDKSIDFSISLVSKNQVKVNGLYLNESVYSSYLDFVKNSDGHHNTSNFMNLFLDNISFWKLFGFENINFVIDKYFTLVGKTNLGYVEFICDNNKNIDIYFGEWKTSSSKSTIFSGNGRNVVVEPIYNPDTGEDISTSLDFSYEPLYGIDRYINKVLIAPDLYTSLININTNYYSNEYYPEIIVLNPNTFHKKVNINLDSSSFEYKWSTEGSDFILVRYLEESNKKILQKIRIKGILSNTQSFNKMSIDFKDIKKLSLGYIMSNFKSFNSENELDRDHLGFKIIDNKTYYYDEDSKLVKGLININNSLFYFDPIEFNLVTGWQTINGKKYYFDINTGAALTSYKIINGKHFYFNNDGVMQLGVFKGPDGFEYFAPANTQNNNIEGQAIVYQSKFLTLNGKKYYFDNDSKAVTGWRIINNEKYYFNPNNAIAAVGLQVIDNNKYYFNPDTAIISKGWQTVNGSRYYFDTDTAIAFNGYKTIDGKHFYFDSDCVVKIGVFSTSNGFEYFAPANTYNNNIEGQAIVYQSKFLTLNGKKYYFDNNSKAVTGWQTIDSKKYYFNTNTAEAATGWQTIDGKKYYFNTNTAEAATGWQTIDGKKYYFNTNTAIASTGYTIINGKHFYFNTDGIMQIGVFKGPNGFEYFAPANTDANNIEGQAILYQNEFLTLNGKKYYFGSDSKAVTGWRIINNKKYYFNPNNAIAAIHLCTINNDKYYFSYDGILQNGYITIERNNFYFDANNESKMVTGVFKGPNGFEYFAPANTHNNNIEGQAIVYQNKFLTLNGKKYYFDNDSKAVTGWQTIDGKKYYFNLNTAEAATGWQTIDGKKYYFNLNTAEAATGWQTIDGKKYYFNTNTFIASTGYTSINGKHFYFNTDGIMQIGVFKGPNGFEYFAPANTDANNIEGQAILYQNKFLTLNGKKYYFGSDSKAVTGLRTIDGKKYYFNTNTAVAVTGWQTINGKKYYFNTNTSIASTGYTIISGKHFYFNTDGIMQIGVFKGPDGFEYFAPANTDANNIEGQAIRYQNRFLYLHDNIYYFGNNSKAATGWVTIDGNRYYFEPNTAMGANGYKTIDNKNFYFRNGLPQIGVFKGSNGFEYFAPANTDANNIEGQAIRYQNRFLHLLGKIYYFGNNSKAVTGWQTINGKVYYFMPDTAMAAAGGLFEIDGVIYFFGVDGVKAPGIYG

SEQ ID NO: 297 - protein, 2709 aa, synthetic construct; identical to SEQ ID NO: 294
  REGION 1..2709: note = Synthetic amino acid sequence

SEQ ID NO: 298 - protein, 2709 aa, synthetic construct; identical to SEQ ID NO: 285
  REGION 1..2709: note = Synthetic amino acid sequence

SEQ ID NO: 299 - protein, 2709 aa, synthetic construct; identical to SEQ ID NO: 294
  REGION 1..2709: note = Synthetic amino acid sequence

SEQ ID NO: 300 - protein, 2709 aa, synthetic construct; identical to SEQ ID NO: 294
  REGION 1..2709: note = Synthetic amino acid sequence

SEQ ID NO: 301 - protein, 2709 aa, synthetic construct
  REGION 1..2709: note = Synthetic amino acid sequence
SLISKEELIKLAYSIRPRENEYKTILTNLDEYNKLTTNNNENKYLQLKKLNESIDVFMNKYKTSSRNRALSNLKKDILKEVILIKNSNTSPVEKNLHFVAIGGEVSDIALEYIKQWADINAEYNIKLWYDSEAFLVNTLKKAIVESSTTEALQLLEEEIQNPQFDNMKFYKKRMEFIYDRQKRFINYYKSQINKPTVPTIDDIIKSHLVSEYNRDETVLESYRTNSLRKINSNHGIDIRANSLFTEQELLNIYSQELLNRGNLAAASDIVRLLALKNFGGVYLDVAMLPGIHSDLFKTISRPSSIGLDRWEMIKLEAIMKYKKYINNYTSENFDKLDQQLKDNFKLIIESKSEKSEIFSKLENLNVSDLEIKIAFALGSVINQALISKQGSYLTNLVIEQVKNRYQFLNQHLNPAIESDNNFTDTTKIFHDSLFNSATAENSMFLTKIAPYLQVGFMPEARSTISLSGPGAYASAYYDFINLQENTIEKTLKASDLIEFKFPENNLSQLTEQQINSLASFDQASAKYQFEKYVRDYTGGSLSEDNGVDFNKNTALDKNYLLNNKIPSNNVEEAGSKNYVHYIIQLQGDDISYEATCNLFSKNPKNSIIIQRNMNESAKSYFLSDDGESILELNKYRIPERLKNKEKVKVTFIGHGKDEFNTSEFARLSVDSLSNEISSFLDTIKLDISPKNVEVNLLGANMFSYDFNVEETYPGKLLLSIMDKITSTLPDVNKNSITIGANQYEVRINSEGRKELLAHSGKWINKEEAIMSDLSSKEYIFFDSIDNKLKAKSKNIPGLASISEDIKTLLLDASVSPDTKFILNNLKLNIESSIGDYIYYEKLEPVKNIIHNSIDDLIDEFNLLENVSDELYELKKLNNLDEKYLISFEDISKNNSTYSVRFINKSNGESVYVETEKEIFSKYSEHITKEISTIKNSIITDVNGNLLDNIQLDHTSQVNTLNAAFFIQSLIDYSSNKDVLNDLSTSVKVQLYAQLFSTGLNTIYDSIQLVNLISNAVNDTINVLPTITEGIPIVSTILDGINLGAAIKELLDEHDPLLKKELEAKVGVLAINMSLSIAATVASIVGIGAEVTIFLLPIAGISAGIPSLVNNELILHDKATSVVNYFNHLSESKKYGPLKTEDDKILVPIDDLVISEIDFNNNSIKLGTCNILAMEGGSGHTVTGNIDHFFSSPSISSHIPSLSIYSAIGIETENLDFSKKIMMLPNAPSRVFWWETGAVPGLRSLENDGTRLLDSIRDLYPGKFYWRFYAFFDYAITTLKPVYEDTNIKIKLDKDTRNFIMPTITTNEIRNKLSYSFDGAGGTYSLLLSSYPISTNINLSKDDLWIFNIDNEVREISIENGTIKKGKLIKDVLSKIDINKNKLIIGNQTIDFSGDIDNKDRYIFLTCELDDKISLIIEINLVAKSYSLLLSGDKNYLISNLSNTIEKINTLGLDSKNIAYNYTDESNNKYFGAISKTSQKSIIHYKKDSKNILEFYNDSTLEFNSKDFIAEDINVFMKDDINTITGKYYVDNNTDKSIDFSISLVSKNQVKVNGLYLNESVYSSYLDFVKNSDGHHNTSNFMNLFLDNISFWKLFGFENINFVIDKYFTLVGKTNLGYVEFICDNNKNIDIYFGEWKTSSSKSTIFSGNGRNVVVEPIYNPDTGEDISTSLDFSYEPLYGIDRYINKVLIAPDLYTSLININTNYYSNEYYPEIIVLNPNTFHKKVNINLDSSSFEYKWSTEGSDFILVRYLEESNKKILQKIRIKGILSNTQSFNKMSIDFKDIKKLSLGYIMSNFKSFNSENELDRDHLGFKIIDNKTYYYDEDSKLVKGLININNSLFYFDPIEFNLVTGWQTINGKKYYFDINTGAALTSYKIINGKHFYFNNDGVMQLGVFKGPDGFEYFAPANTQNNNIEGQAIVYQSKFLTLNGKKYYFDNDSKAVTGWRIINNEKYYFNPNNAIAAVGLQVIDNNKYYFNPDTAIISKGWQTVNGSRYYFDTDTAIAFNGYKTIDGKHFYFDSDCVVKIGVFSTSNGFEYFAPANTYNNNIEGQAIVYQSKFLTLNGKKYYFDDNSKAVTGWQTIDSKKYYFNTNTAEAATGWQTIDGKKYYFNTNTAEAATGWQTIDGKKYYFNTNTAIASTGYTIINGKHFYFNTDGIMQIGVFKGPNGFEYFAPANTDANNIEGQAILYQNEFLTLNGKKYYFGSDSKAVTGWRIINNKKYYFNPNNAIAAIHLCTINNDKYYFSYDGILQNGYITIERNNFYFDANNESKMVTGVFKGPNGFEYFAPANTYNNNIEGQAIVYQNKFLTLNGKKYYFDNDSKAVTGWQTIDGKKYYFNLNTAEAATGWQTIDGKKYYFNLNTAEAATGWQTIDGKKYYFNTNTFIASTGYTSINGKHFYFNTDGIMQIGVFKGPNGFEYFAPANTHNNNIEGQAILYQNKFLTLNGKKYYFGSDSKAVTGLRTIDGKKYYFNTNTAVAVTGWQTINGKKYYFNTNTSIASTGYTIISGKHFYFNTDGIMQIGVFKGPDGFEYFAPANTDANNIEGQAIRYQNRFLYLHDNIYYFGNNSKAATGWVTIDGNRYYFEPNTAMGANGYKTIDNKNFYFRNGLPQIGVFKGSNGFEYFAPANTDANNIEGQAIRYQNRFLHLLGKIYYFGNNSKAVTGWQTINGKVYYFMPDTAMAAAGGLFEIDGVIYFFGVDGVKAPGIYG

SEQ ID NO: 302 - protein, 2708 aa, synthetic construct
  REGION 1..2708: note = Synthetic amino acid sequence
SLISKEELIKLAYSIRPRENEYKTILTNLDEYNKLTTNNNENKYLQLKKLNESIDVFMNKYKTSSRNRALSNLKKDILKEVILIKNSNTSPVEKNLHFVAIGGEVSDIALEYIKQWADINAEYNIKLWYDSEAFLVNTLKKAIVESSTTEALQLLEEEIQNPQFDNMKFYKKRMEFIYDRQKRFINYYKSQINKPTVPTIDDIIKSHLVSEYNRDETVLESYRTNSLRKINSNHGIDIRANSLFTEQELLNIYSQGLLNRGNLAAASDIVRLLALKNFGGVYLDVAMLPGIHSDLFKTISRPSSIGLDRWEMIKLEAIMKYKKYINNYTSENFDKLDQQLKDNFKLIIESKSEKSEIFSKLENLNVSDLEIKIAFALGSVINQALISKQGSYLTNLVIEQVKNRYQFLNQHLNPAIESDNNFTDTTKIFHDSLFNSATAENSMFLTKIAPYLQVGFMPEARSTISLSGPGAYASAYYDFINLQENTIEKTLKASDLIEFKFPENNLSQLTQQINSLASFDQASAKYQFEKYVRDYTGGSLSEDNGVDFNKNTALDKNYLLNNKIPSNNVEEAGSKNYVHYIIQLQGDDISYEATCNLFSKNPKNSIIIQRNMNESAKSYFLSDDGESILELNKYRIPERLKNKEKVKVTFIGHGKDEFNTSEFARLSVDSLSNEISSFLDTIKLDISPKNVEVNLLGANMFSYDFNVEETYPGKLLLSIMDKITSTLPDVNKNSITIGANQYEVRINSEGRKELLAHSGKWINKEEAIMSDLSSKEYIFFDSIDNKLKAKSKNIPGLASISEDIKTLLLDASVSPDTKFILNNLKLNIESSIGDYIYYEKLEPVKNIIHNSIDDLIDEFNLLENVSDELYELKKLNNLDEKYLISFEDISKNNSTYSVRFINKSNGESVYVETEKEIFSKYSEHITKEISTIKNSIITDVNGNLLDNIQLDHTSQVNTLNAAFFIQSLIDYSSNKDVLNDLSTSVKVQLYAQLFSTGLNTIYDSIQLVNLISNAVNDTINVLPTITEGIPIVSTILDGINLGAAIKELLDEHDPLLKKELEAKVGVLAINMSLSIAATVASIVGIGAEVTIFLLPIAGISAGIPSLVNNELILHDKATSVVNYFNHLSESKKYGPLKTEDDKILVPIDDLVISEIDFNNNSIKLGTCNILAMEGGSGHTVTGNIDHFFSSPSISSHIPSLSIYSAIGIETENLDFSKKIMMLPNAPSRVFWWETGAVPGLRSLENDGTRLLDSIRDLYPGKFYWRFYAFFDYAITTLKPVYEDTNIKIKLDKDTRNFIMPTITTNEIRNKLSYSFDGAGGTYSLLLSSYPISTNINLSKDDLWIFNIDNEVREISIENGTIKKGKLIKDVLSKIDINKNKLIIGNQTIDFSGDIDNKDRYIFLTCELDDKISLIIEINLVAKSYSLLLSGDKNYLISNLSNIIEKINTLGLDSKNIAYNYTDESNNKYFGAISKTSQKSIIHYKKDSKNILEFYNDSTLEFNSKDFIAEDINVFMKDDINTITGKYYVDNNTDKSIDFSISLVSKNQVKVNGLYLNESVYSSYLDFVKNSDGHHNTSNFMNLFLDNISFWKLFGFENINFVIDKYFTLVGKTNLGYVEFICDNNKNIDIYFGEWKTSSSKSTIFSGNGRNVVVEPIYNPDTGEDISTSLDFSYEPLYGIDRYINKVLIAPDLYTSLININTNYYSNEYYPEIIVLNPNTFHKKVNINLDSSSFEYKWSTEGSDFILVRYLEESNKKILQKIRIKGILSNTQSFNKMSIDFKDIKKLSLGYIMSNFKSFNSENELDRDHLGFKIIDNKTYYYDEDSKLVKGLININNSLFYFDPIEFNLVTGWQTINGKKYYFDINTGAALISYKIINGKHFYFNNDGVMQLGVFKGPDGFEYFAPANTQNNNIEGQAIVYQSKFLTLNGKKYYFDNDSKAVTGWRIINNEKYYFNPNNAIAAVGLQVIDNNKYYFNPDTAIISKGWQTVNGSRYYFDTDTAIAFNGYKTIDGKHFYFDSDCVVKIGVFSTSNGFEYFAPANTYNNNIEGQAIVYQSKFLTLNGKKYYFDNNSKAVTGWQTIDSKKYYFNTNTAEAATGWQTIDGKKYYFNTNTAEAATGWQTIDGKKYYFNTNTAIASTGYTIINGKHFYFNTDGIMQIGVFKGPNGFEYFAPANTDANNIEGQAILYQNEFLTLNGKKYYFGSDSKAVTGWRIINNKKYYFNPNNAIAAIHLCTINNDKYYFSYDGILQNGYITIERNNFYFDANNESKMVTGVFKGPNGFEYFAPANTHNNNIEGQAIVYQNKFLTLNGKKYYFDNDSKAVTGWQTIDGKKYYFNLNTAEAATGWQTIDGKKYYFNLNTAEAATGWQTIDGKKYYFNTNTFIASTGYTSINGKHFYFNTDGIMQIGVFKGPNGFEYFAPANTHNNNIEGQAILYQNKFLTLNGKKYYFGSDSKAVTGLRTIDGKKYYFNTNTAVAVTGWQTINGKKYYFNTNTSIASTGYTIISGKHFYFNTDGIMQIGVFKGPDGFEYFAPANTDANNIEGQAIRYQNRFLYLHDNIYYFGNNSKAATGWVTIDGNRYYFEPNTAMGANGYKTIDNKNFYFRNGLPQIGVFKGSNGFEYFAPANTDANNIEGQAIRYQNRFLHLLGKIYYFGNNSKAVTGWQTINGKVYYFMPDTAMAAAGGLFEIDGVIYFFGVDGVKAPGIYG

SEQ ID NO: 303 - protein, 2708 aa, synthetic construct
  REGION 1..2708: note = Synthetic amino acid sequence
SLISKEELIKLAYSIRPRENEYKTILTNLDEYNKLTTNNNENKYLQLKKLNESIDVFMNKYKTSSRNRALSNLKKDILKEVILIKNSNTSPVEKNLHFVAIGGEVSDIALEYIKQWADINAEYNIKLWYDSEAFLVNTLKKAIVESSTTEALQLLEEEIQNPQFDNMKFYKKRMEFIYDRQKRFINYYKSQINKPTVPTIDDIIKSHLVSEYNRDETVLESYRTNSLRKINSNHGIDIRANSLFTEQELLNIYSQELLNRGNLAAASDIVRLLALKNFGGVYLDVAMLPGIHSDLFKTISRPSSIGLDRWEMIKLEAIMKYKKYINNYTSENFDKLDQQLKDNFKLIIESKSEKSEIFSKLENLNVSDLEIKIAFALGSVINQALISKQGSYLTNLVIEQVKNRYQFLNQHLNPAIESDNNFTDTTKIFHDSLFNSATAENSMFLTKIAPYLQVGFMPEARSTISLSGPGAYASAYYDFINLQENTIEKTLKASDLIEFKFPENNLSQLTQQINSLASFDQASAKYQFEKYVRDYTGGSLSEDNGVDFNKNTALDKNYLLNNKIPSNNVEEAGSKNYVHYIIQLQGDDISYEATCNLFSKNPKNSIIIQRNMNESAKSYFLSDDGESILELNKYRIPERLKNKEKVKVTFIGHGKDEFNTSEFARLSVDSLSNEISSFLDTIKLDISPKNVEVNLLGANMFSYDFNVEETYPGKLLLSIMDKITSTLPDVNKNSITIGANQYEVRINSEGRKELLAHSGKWINKEEAIMSDLSSKEYIFFDSIDNKLKAKSKNIPGLASISEDIKTLLLDASVSPDTKFILNNLKLNIESSIGDYIYYEKLEPVKNIIHNSIDDLIDEFNLLENVSDELYELKKLNNLDEKYLISFEDISKNNSTYSVRFINKSNGESVYVETEKEIFSKYSEHITKEISTIKNSIITDVNGNLLDNIQLDHTSQVNTLNAAFFIQSLIDYSSNKDVLNDLSTSVKVQLYAQLFSTGLNTIYDSIQLVNLISNAVNDTINVLPTITEGIPIVSTILDGINLGAAIKELLDEHDPLLKKELEAKVGVLAINMSLSIAATVASIVGIGAEVTIFLLPIAGISAGIPSLVNNELILHDKATSVVNYFNHLSESKKYGPLKTEDDKILVPIDDLVISEIDFNNNSIKLGTCNILAMEGGSGHTVTGNIDHFFSSPSISSHIPSLSIYSAIGIETENLDFSKKIMMLPNAPSRVFWWETGAVPGLRSLENDGTRLLDSIRDLYPGKFYWRFYAFFDYAITTLKPVYEDTNIKIKLDKDTRNFIMPTITTNEIRNKLSYSFDGAGGTYSLLLSSYPISTNINLSKDDLWIFNIDNEVREISIENGTIKKGKLIKDVLSKIDINKNKLIIGNQTIDFSGDIDNKDRYIFLTCELDDKISLIIEINLVAKSYSLLLSGDKNYLISNLSNTIEKINTLGLDSKNIAYNYTDESNNKYFGAISKTSQKSIIHYKKDSKNILEFYNDSTLEFNSKDFIAEDINVFMKDDINTITGKYYVDNNTDKSIDFSISLVSKNQVKVNGLYLNESVYSSYLDFVKNSDGHHNTSNFMNLFLDNISFWKLFGFENINFVIDKYFTLVGKTNLGYVEFICDNNKNIDIYFGEWKTSSSKSTIFSGNGRNVVVEPIYNPDTGEDISTSLDFSYEPLYGIDRYINKVLIAPDLYTSLININTNYYSNEYYPEIIVLNPNTFHKKVNINLDSSSFEYKWSTEGSDFILVRYLEESNKKILQKIRIKGILSNTQSFNKMSIDFKDIKKLSLGYIMSNFKSFNSENELDRDHLGFKIIDNKTYYYDEDSKLVKGLININNSLFYFDPIEFNLVTGWQTINGKKYYFDINTGAALTSYKIINGKHFYFNNDGVMQLGVFKGPDGFEYFAPANTQNNNIEGQAIVYQSKFLTLNGKKYYFDNDSKAVTGWRIINNEKYYFNPNNAIAAVGLQVIDNNKYYFNPDTAIISKGWQTVNGSRYYFDTDTAIAFNGYKTIDGKHFYFDSDCVVKIGVFSTSNGFEYFAPANTYNNNIEGQAIVYQSKFLTLNGKKYYFDNNSKAVTGWQTIDSKKYYFNTNTAEAATGWQTIDGKKYYFNTNTAEAATGWQTIDGKKYYFNTNTAIASTGYTIINGKHFYFNTDGIMQIGVFKGPNGFEYFAPANTDANNIEGQAILYQNEFLTLNGKKYYFGSDSKAVTGWRIINNKKYYFNPNNAIAAIHLCTINNDKYYFSYDGILQNGYITIERNNFYFDANNESKMVTGVFKGPNGFEYFAPANTHNNNIEGQAIVYQNKFLTLNGKKYYFDNDSKAVTGWQTIDGKKYYFNLNTAEAATGWQTIDGKKYYFNLNTAEAATGWQTIDGKKYYFNTNTFIASTGYTSINGKHFYFNTDGIMQIGVFKGPNGFEYFAPANTHNNNIEGQAILYQNKFLTLNGKKYYFGSDSKAVTGLRTIDGKKYYFNTNTAVAVTGWQTINGKKYYFNTNTSIASTGYTIISGKHFYFNTDGIMQIGVFKGPDGFEYFAPANTDANNIEGQAIRYQNRFLYLHDNIYYFGNNSKAATGWVTIDGNRYYFEPNTAMGANGYKTIDNKNFYFRNGLPQIGVFKGSNGFEYFAPANTDANNIEGQAIRYQNRFLHLLGKIYYFGNNSKAVTGWQTINGKVYYFMPDTAMAAAGGLFEIDGVIYFFGVDGVKAPGIYG

SEQ ID NO: 304 - protein, 2709 aa, synthetic construct
  REGION 1..2709: note = Synthetic amino acid sequence
SLISKEELIKLAYSIRPRENEYKTILTNLDEYNKLTTNNNENKYLQLKKLNESIDVFMNKYKTSSRNRALSNLKKDILKEVILIKNSNTSPVEKNLHFVAIGGEVSDIALEYIKQWADINAEYNIKLWYDSEAFLVNTLKKAIVESSTTEALQLLEEEIQNPQFDNMKFYKKRMEFIYDRQKRFINYYKSQINKPTVPTIDDIIKSHLVSEYNRDETVLESYRTNSLRKINSNHGIDIRANSLFTEQELLNIYSQELLNRGNLAAASDIVRLLALKNFGGVYLDVAMLPGIHSDLFKTISRPSSIGLDRWEMIKLEAIMKYKKYINNYTSENFDKLDQQLKDNFKLIIESKSEKSEIFSKLENLNVSDLEIKIAFALGSVINQALISKQGSYLTNLVIEQVKNRYQFLNQHLNPAIESDNNFTDTTKIFHDSLFNSATAENSMFLTKIAPYLQVGFMPEARSTISLSGPGAYASAYYDFINLQENTIEKTLKASDLIEFKFPENNLSQLTEQQINSLASFDQASAKYQFEKYVRDYTGGSLSEDNGVDFNKNTALDKNYLLNNKIPSNNVEEAGSKNYVHYIIQLQGDDISYEATCNLFSKNPKNSIIIQRNMNESAKSYFLSDDGESILELNKYRIPERLKNKEKVKVTFIGHGKDEFNTSEFARLSVDSLSNEISSFLDTIKLDISPKNVEVNLLGANMFSYDFNVEETYPGKLLLSIMDKITSTLPDVNKNSITIGANQYEVRINSEGRKELLAHSGKWINKEEAIMSDLSSKEYIFFDSIDNKLKAKSKNIPGLASISEDIKTLLLDASVSPDTKFILNNLKLNIESSIGDYIYYEKLEPVKNIIHNSIDDLIDEFNLLENVSDELYELKKLNNLDEKYLISFEDISKNNSTYSVRFINKSNGESVYVETEKEIFSKYSEHITKEISTIKNSIITDVNGNLLDNIQLDHTSQVNTLNAAFFIQSLIDYSSNKDVLNDLSTSVKVQLYAQLFSTGLNTIYDSIQLVNLISNAVNDTINVLPTITEGIPIVSTILDGINLGAAIKELLDEHDPLLKKELEAKVGVLAINMSLSIAATVASIVGIGAEVTIFLLPIAGISAGIPSLVNNELILHDKATSVVNYFNHLSESKKYGPLKTEDDKILVPIDDLVISEIDFNNNSIKLGTCNILAMEGGSGHTVTGNIDHFFSSPSISSHIPSLSIYSAIGIETENLDFSKKIMMLPNAPSRVFWWETGAVPGLRSLENDGTRLLDSIRDLYPGKFYWRFYAFFDYAITTLKPVYEDTNIKIKLDKDTRNFIMPTITTNEIRNKLSYSFDGAGGTYSLLLSSYPISTNINLSKDDLWIFNIDNEVREISIENGTIKKGKLIKDVLSKIDINKNKLIIGNQTIDFSGDIDNKDRYIFLTCELDDKISLIIEINLVAKSYSLLLSGDKNYLISNLSNTIEKINTLGLDSKNIAYNYTDESNNKYFGAISKTSQKSIIHYKKDSKNILEFYNDSTLEFNSKDFIAEDINVFMKDDINTITGKYYVDNNTDKSIDFSISLVSKNQVKVNGLYLNESVYSSYLDFVKNSDGHHNTSNFMNLFLDNISFWKLFGFENINFVIDKYFTLVGKTNLGYVEFICDNNKNIDIYFGEWKTSSSKSTIFSGNGRNVVVEPIYNPDTGEDISTSLDFSYEPLYGIDRYINKVLIAPDLYTSLININTNYYSNEYYPEIIVLNPNTFHKKVNINLDSSSFEYKWSTEGSDFILVRYLEESNKKILQKIRIKGILSNTQSFNKMSIDFKDIKKLSLGYIMSNFKSFNSENELDRDHLGFKIIDNKTYYYDEDSKLVKGLININNSLFYFDPIEFNLVTGWQTINGKKYYFDINTGAALTSYKIINGKHFYFNNDGVMQLGVFKGPDGFEYFAPANTQNNNIEGQAIVYQSKFLTLNGKKYYFDNNSKAVTGWRIINNEKYYFNPNNAIAAVGLQVIDNNKYYFNPDTAIISKGWQTVNGSRYYFDTDTAIAFNGYKTIDGKHFYFDSDCVVKIGVFSTSNGFEYFAPANTYNNNIEGQAIVYQSKFLTLNGKKYYFDNNSKAVTGWQTIDSKKYYFNTNTAEAATGWQTIDGKKYYFNTNTAEAATGWQTIDGKKYYFNTNTAIASTGYTIINGKHFYFNTDGIMQIGVFKGPNGFEYFAPANTDANNIEGQAILYQNEFLTLNGKKYYFGSDSKAVTGWRIINNKKYYFNPNNAIAAIHLCTINNDKYYFSYDGILQNGYITIERNNFYFDANNESKMVTGVFKGPNGFEYFAPANTHNNNIEGQAIVYQNKFLTLNGKKYYFDNDSKAVTGWQTIDGKKYYFNLNTAEAATGWQTIDGKKYYFNLNTAEAATGWQTIDGKKYYFNTNTFIASTGYTSINGKHFYFNTDGIMQIGVFKGPNGFEYFAPANTDANNIEGQAILYQNKFLTLNGKKYYFGSDSKAVTGLRTIDGKKYYFNTNTAVAVTGWQTINGKKYYFNTNTSIASTGYTIISGKHFYFNTDGIMQIGVFKGPDGFEYFAPANTDANNIEGQAIRYQNRFLYLHDNIYYFGNNSKAATGWVTIDGNRYYFEPNTAMGANGYKTIDNKNFYFRNGLPQIGVFKGSNGFEYFAPANTDANNIEGQAIRYQNRFLHLLGKIYYFGNNSKAVTGWQTINGKVYYFMPDTAMAAAGGLFEIDGVIYFFGVDGVKAPGIYG

SEQ ID NO: 305 - protein, 2709 aa, synthetic construct
  REGION 1..2709: note = Synthetic amino acid sequence
SLISKEELIKLAYSIRPRENEYKTILTNLDEYNKLTTNNNENKYLQLKKLNESIDVFMNKYKTSSRNRALSNLKKDILKEVILIKNSNTSPVEKNLHFVAIGGEVSDIALEYIKQWADINAEYNIKLWYDSEAFLVNTLKKAIVESSTTEALQLLEEEIQNPQFDNMKFYKKRMEFIYDRQKRFINYYKSQINKPTVPTIDDIIKSHLVSEYNRDETVLESYRTNSLRKINSNHGIDIRANSLFTEQELLNIYSQELLNRGNLAAASDIVRLLALKNFGGVYLDVAMLPGIHSDLFKTISRPSSIGLDRWEMIKLEAIMKYKKYINNYTSENFDKLDQQLKDNFKLIIESKSEKSEIFSKLENLNVSDLEIKIAFALGSVINQALISKQGSYLTNLVIEQVKNRYQFLNQHLNPAIESDNNFTDTTKIFHDSLFNSATAENSMFLTKIAPYLQVGFMPEARSTISLSGPGAYASAYYDFINLQENTIEKTLKASDLIEFKFPENNLSQLTEQQINSLASFDQASAKYQFEKYVRDYTGGSLSEDNGVDFNKNTALDKNYLLNNKIPSNNVEEAGSKNYVHYIIQLQGDDISYEATCNLFSKNPKNSIIIQRNMNESAKSYFLSDDGESILELNKYRIPERLKNKEKVKVTFIGHGKDEFNTSEFARLSVDSLSNEISSFLDTIKLDISPKNVEVNLLGANMFSYDFNVEETYPGKLLLSIMDKITSTLPDVNKNSITIGANQYEVRINSEGRKELLAHSGKWINKEEAIMSDLSSKEYIFFDSIDNKLKAKSKNIPGLASISEDIKTLLLDASVSPDTKFILNNLKLNIESSIGDYIYYEKLEPVKNIIHNSIDDLIDEFNLLENVSDELYELKKLNNLDEKYLISFEDISKNNSTYSVRFINKSNGESVYVETEKEIFSKYSEHITKEISTIKNSIITDVNGNLLDNIQLDHTSQVNTLNAAFFIQSLIDYSSNKDVLNDLSTSVKVQLYAQLFSTGLNTIYDSIQLVNLISNAVNDTINVLPTITEGIPIVSTILDGINLGAAIKELLDEHDPLLKKELEAKVGVLAINMSLSIAATVASIVGIGAEVTIFLLPIAGISAGIPSLVNNELILHDKATSVVNYFNHLSESKKYGPLKTEDDKILVPIDDLVISEIDFNNNSIKLGTCNILAMEGGSGHTVTGNIDHFFSSPSISSHIPSLSIYSAIGIETENLDFSKKIMMLPNAPSRVFWWETGAVPGLRSLENDGTRLLDSIRDLYPGKFYWRFYAFFDYAITTLKPVYEDTNIKIKLDKDTRNFIMPTITTNEIRNKLSYSFDGAGGTYSLLLSSYPISTNINLSKDDLWIFNIDNEVREISIENGTIKKGKLIKDVLSKIDINKNKLIIGNQTIDFSGDIDNKDRYIFLTCELDDKISLIIEINLVAKSYSLLLSGNKNYLISNLSNTIEKINTLGLDSKNIAYNYTDESNNKYFGAISKTSQKSIIHYKKDSKNILEFYNDSTLEFNSKDFIAEDINVFMKDDINTITGKYYVDNNTDKGIDFSISLVSKNQVKVNGLYLNESVYSSYLDFVKNSDGHHNTSNFMNLFLDNISFWKLFGFENINFVIDKYFTLVGKTNLGYVEFICDNNKNIDIYFGEWKTSSSKSTIFSGNGRNVVVEPIYNPDTGEDISTSLDFSYEPLYGIDRYINKVLIAPDLYTSLININTNYYSNEYYPEIIVLNPNTFHKKVNINLDSSSFEYKWSTEGSDFILVRYLEESNKKILQKIRIKGILSNTQSFNKMSIDFKDIKKLSLGYIMSNFKSFNSENELDRDHLGFKIIDNKTYYYDEDSKLVKGLININNSLFYFDPIEFNLVTGWQTINGKKYYFDINTGAALTSYKIINGKHFYFNNDGVMQLGVFKGPDGFEYFAPANTQNNNIEGQAIVYQSKFLTLNGKKYYFDNDSKAVTGWRIINNEKYYFNPNNAIAAVGLQVIDNNKYYFNPDTAIISKGWQTVNGSRYYFDTDTAIAFNGYKTIDGKHFYFDSDCVVKIGVFSTSNGFEYFAPANTYNNNIEGQAIVYQSKFLTLNGKKYYFDDNSKAVTGWQTIDSKKYYFNTNTAEAATGWQTIDGKKYYFNTNTAEAATGWQTIDGKKYYFNTNTAIASTGYTIINGKHFYFNTDGIMQIGVFKGPNGFEYFAPANTDANNIEGQAILYQNEFLTLNGKKYYFGSDSKAVTGWRIINNKKYYFNPNNAIAAIHLCTINNDKYYFSYDGILQNGYITIERNNFYFDANNESKMVTGVFKGPNGFEYFAPANTHNNNIEGQAIVYQNKFLTLNGKKYYFDNDSKAVTGWQTIDGKKYYFNLNTAEAATGWQTIDGKKYYFNLNTAEAATGWQTIDGKKYYFNTNTFIASTGYTSINGKHFYFNTDGIMQIGVFKGPNGFEYFAPANTHNNNIEGQAILYQNKFLTLNGKKYYFGSDSKAVTGLRTIDGKKYYFNTNTAVAVTGWQTINGKKYYFNTNTSIASTGYTIISGKHFYFNTDGIMQIGVFKGPDGFEYFAPANTDANNIEGQAIRYQNRFLYLHDNIYYFGNNSKAATGWVTIDGNRYYFEPNTAMGANGYKTIDNKNFYFRNGLPQIGVFKGSNGFEYFAPANTDANNIEGQAIRYQNRFLHLLGKIYYFGNNSKAVTGWQTINGKVYYFMPDTAMAAAGGLFEIDGVIYFFGVDGVKAPGIYG

SEQ ID NO: 306 - protein, 2709 aa, synthetic construct; identical to SEQ ID NO: 305
  REGION 1..2709: note = Synthetic amino acid sequence

SEQ ID NO: 307 - protein, 2709 aa, synthetic construct; identical to SEQ ID NO: 294
  REGION 1..2709: note = Synthetic amino acid sequence

SEQ ID NO: 308 - protein, 2709 aa, synthetic construct; identical to SEQ ID NO: 286
  REGION 1..2709: note = Synthetic amino acid sequence

SEQ ID NO: 309 - protein, 2709 aa, synthetic construct
  REGION 1..2709: note = Synthetic amino acid sequence
SLISKEELIKLAYSIRPRENEYKTILTNLDEYNKLTTNNNENKYLQLKKLNESIDVFMNKYKTSSRNRALSNLKKDILKEVILIKNSNTSPVEKNLHFVAIGGEVSDIALEYIKQWADINAEYNIKLWYDSEAFLVNTLKKAIVESSTTEALQLLEEEIQNPQFDNMKFYKKRMEFIYDRQKRFINYYKSQINKPTVPTIDDIIKSHLVSEYNRDETVLESYRTNSLRKINSNHGIDIRANSLFTEQELLNIYSQELLNRGNLAAASDIVRLLALKNFGGVYLDVAMLPGIHSDLFKTISRPSSIGLDRWEMIKLEAIMKYKKYINNYTSENFDKLDQQLKDNFKLIIESKSEKSEIFSKLENLNVSDLEIKIAFALGSVINQALISKQGSYLTNLVIEQVKNRYQFLNQHLNPAIESDNNFTDTTKIFHDSLFNSATAENSMFLTKIAPYLQVGFMPEARSTISLSGPGAYASAYYDFINLQENTIEKTLKASDLIEFKFPENNLSQLTEQQINSLASFDQASAKYQFEKYVRDYTGGSLSEDNGVDFNKNTALDKNYLLNNKIPSNNVEEAGSKNYVHYIIQLQGDDISYEATCNLFSKNPKNSIIIQRNMNESAKSYFLSDDGESILELNKYRIPERLKNKEKVKVTFIGHGKDEFNTSEFARLSVDSLSNEISSFLDTIKLDISPKNVEVNLLGANMFSYDFNVEETYPGKLLLSIMDKITSTLPDVNKNSITIGANQYEVRINSEGRKELLAHSGKWINKEEAIMSDLSSKEYIFFDSIDNKLKAKSKNIPGLASISEDIKTLLLDASVSPDTKFILNNLKLNIESSIGDYIYYEKLEPVKNIIHNSIDDLIDEFNLLENVSDELYELKKLNNLDEKYLISFEDISKNNSTYSVRFINKSNGESVYVETEKEIFSKYSEHITKEISTIKNSIITDVNGNLLDNIQLDHTSQVNTLNAAFFIQSLIDYSSNKDVLNDLSTSVKVQLYAQLFSTGLNTIYDSIQLVNLISNAVNDTINVLPTITEGIPIVSTILDGINLGAAIKELLDEHDPLLKKELEAKVGVLAINMSLSIAATVASIVGIGAEVTIFLLPIAGISAGIPSLVNNELILHDKATSVVNYFNHLSESKKYGPLKTEDDKILVPIDDLVISEIDFNNNSIKLGTCNILAMEGGSGHTVTGNIDHFFSSPSISSHIPSLSIYSAIGIETENLDFSKKIMMLPNAPSRVFWWETGAVPGLRSLENDGTRLLDSIRDLYPGKFYWRFYAFFDYAITTLKPVYEDTNIKIKLDKDTRNFIMPTITTNEIRNKLSYSFDGAGGTYSLLLSSYPISTNINLSKDDLWIFNIDNEVREISIENGTIKKGKLIKDVLSKIDINKNKLIIGNQTIDFSGDIDNKDRYIFLTCELDDKISLIIEINLVAKSYSLLLSGDKNYLISNLSNTIEKINTLGLDSKNIAYNYTDESNNKYFGAISKTSQKSIIHYKKDSKNILEFYNDSTLEFNSKDFIAEDINVFMKDDINTITGKYYVDNNTDKSIDFSISLVSKNQVKVNGLYLNESVYSSYLDFVKNSDGHHNTSNFMNLFLDNISFWKLFGFENINFVIDKYFTLVGKTNLGYVEFICDNNKNIDIYFGEWKTSSSKSTIFSGNGRNVVVEPIYNPNTGEDISTSLDFSYEPLYGIDRYINKVLIAPDLYTSLININTNYYSNEYYPEIIVLNPNTFHKKVNINLDSSSFEYKWSTEGSDFILVRYLEESNKKILQKIRIKGILSNTQSFNKMSIDFKDIKKLSLGYIMSNFKSFNSENELDRDHLGFKIIDNKTYYYDEDSKLVKGLININNSLFYFDPIEFNLVTGWQTINGKKYYFDINTGAALTSYKIINGKHFYFNNDGVMQLGVFKGPDGFEYFAPANTQNNNIEGQAIVYQSKFLTLNGKKYYFDNNSKAVTGWRIINNEKYYFNPNNAIAAVGLQVIDNNKYYFNPDTAIISKGWQTVNGSRYYFDTDTAIAFNGYKTIDGKHFYFDSDCVVKIGVFSTSNGFEYFAPANTYNNNIEGQAIVYQSKFLTLNGKKYYFDNNSKAVTGWQTIDSKKYYFNTNTAEAATGWQTIDGKKYYFNTNTAEAATGWQTIDGKKYYFNTNTAIASTGYTIINGKHFYFNTDGIMQIGVFKGPNGFEYFAPANTDANNIEGQAILYQNEFLTLNGKKYYFGSDSKAVTGWRIINNKKYYFNPNNAIAAIHLCTINNDKYYFSYDGILQNGYITIERNNFYFDANNESKMVTGVFKGPNGFEYFAPANTHNNNIEGQAIVYQNKFLTLNGKKYYFDNDSKAVTGWQTIDGKKYYFNLNTAEAATGWQTIDGKKYYFNLNTAEAATGWQTIDGKKYYFNTNTFIASTGYTSINGKHFYFNTDGIMQIGVFKGPNGFEYFAPANTDANNIEGQAILYQNKFLTLNGKKYYFGSDSKAVTGLRTIDGKKYYFNTNTAVAVTGWQTINGKKYYFNTNTSIASTGYTIISGKHFYFNTDGIMQIGVFKGPDGFEYFAPANTDANNIEGQAIRYQNRFLYLHDNIYYFGNNSKAATGWVTIDGNRYYFEPNTAMGANGYKTIDNKNFYFRNGLPQIGVFKGSNGFEYFAPANTDANNIEGQAIRYQNRFLHLLGKIYYFGNNSKAVTGWQTINGKVYYFMPDTAMAAAGGLFEIDGVIYFFGVDGVKAPGIYG

SEQ ID NO: 310 - protein, 2709 aa, synthetic construct
  REGION 1..2709: note = Synthetic amino acid sequence
SLISKEELIKLAYSIRPRENEYKTILTNLDEYNKLTTNNNENKYLQLKKLNESIDVFMNKYKTSSRNRALSNLKKDILKEVILIKNSNTSPVEKNLHFVAIGGEVSDIALEYIKQWADINAEYNIKLWYDSEAFLVNTLKKAIVESSTTEALQLLEEEIQNPQFDNMKFYKKRMEFIYDRQKRFINYYKSQINKPTVPTIDDIIKSHLVSEYNRDETVLESYRTNSLRKINSNHGIDIRANSLFTEQELLNIYSQELLNRGNLAAASDIVRLLALKNFGGVYLDVAMLPGIHSDLFKTISRPSSIGLDRWEMIKLEAIMKYKKYINNYTSENFDKLDQQLKDNFKLIIESKSEKSEIFSKLENLNVSDLEIKIAFALGSVINQALISKQGSYLTNLVIEQVKNRYQFLNQHLNPAIESDNNFTDTTKIFHDSLFNSATAENSMFLTKIAPYLQVGFMPEARSTISLSGPGAYASAYYDFINLQENTIEKTLKASDLIEFKFPENNLSQLTEQQINSLASFDQASAKYQFEKYVRDYTGGSLSEDNGVDFNKNTALDKNYLLNNKIPSNNVEEAGSKNYVHYIIQLQGDDISYEATCNLFSKNPKNSIIIQRNMNESAKSYFLSDDGESILELNKYRIPERLKNKEKVKVTFIGHGKDEFNTSEFARLSVDSLSNEISSFLDTIKLDISPKNVEVNLLGANMFSYDFNVEETYPGKLLLSIMDKITSTLPDVNKNSITIGANQYEVRINSEGRKELLAHSGKWINKEEAIMSDLSSKEYIFFDSIDNKLKAKSKNIPGLASISEDIKTLLLDASVSPDTKFILNNLKLNIESSIGDYIYYEKLEPVKNIIHNSIDDLIDEFNLLENVSDELYELKKLNNLDEKYLISFEDISKNNSTYSVRFINKSNGESVYVETEKEIFSKYSEHITKEISTIKNSIITDVNGNLLDNIQLDHTSQVNTLNAAFFIQSLIDYSSNKDVLNDLSTSVKVQLYAQLFSTGLNTIYDSIQLVNLISNAVNDTINVLPTITEGIPIVSTILDGINLGAAIKELLDEHDPLLKKELEAKVGVLAINMSLSIAATVASIVGIGAEVTIFLLPIAGISAGIPSLVNNELILHDKATSVVNYFNHLSESKKYGPLKTEDDKILVPIDDLVISEIDFNNNSIKLGTCNILAMEGGSGHTVTGNIDHFFSSPSISSHIPSLSIYSAIGIETENLDFSKKIMMLPNAPSRVFWWETGAVPGLRSLENDGTRLLDSIRDLYPGKFYWRFYAFFDYAITTLKPVYEDTNIKIKLDKDTRNFIMPTITTNEIRNKLSYSFDGAGGTYSLLLSSYPISTNINLSKDDLWIFNIDNEVREISIENGTIKKGKLIKDVLSKIDINKNKLIIGNQTIDFSGDIDNKDRYIFLTCELDDKISLIIEINLVAKSYSLLLSGDKNYLISNLSNTIEKINTLGLDSKNIAYNYTDESNNKYFGAISKTSQKSIIHYKKDSKNILEFYNDSTLEFNSKDFIAEDINVFMKDDVNTITGKYYVDNNTDKSIDFSISLVSKNQVKVNGLYLNESVYSSYLDFVKNSDGHHNTSNFMNLFLDNISFWKLFGFENINFVIDKYFTLVGKTNLGYVEFICDNNKNIDIYFGEWKTSSSKSTIFSGNGRNVVVEPIYNPDTGEDISTSLDFSYEPLYGIDRYINKVLIAPDLYTSLININTNYYSNEYYPEIIVLNPNTFHKKVNINLDSSSFEYKWSTEGSDFILVRYLEESNKKILQKIRIKGILSNTQSFNKMSIDFKDIKKLSLGYIMSNFKSFNSENELDRDHLGFKIIDNKTYYYDEDSKLVKGLININNSLFYFDPIEFNLVTGWQTINGKKYYFDINTGAALTSYKIINGKHFYFNNDGVMQLGVFKGPDGFEYFAPANTQNNNIEGQAIVYQSKFLTLNGKKYYFDNNSKAVTGWRIINNEKYYFNPNNAIAAVGLQVIDNNKYYFNPDTAIISKGWQTVNGSRYYFDTDTAIAFNGYKTIDGKHFYFDSDCVVKIGVFSTSNGFEYFAPANTYNNNIEGQAIVYQSKFLTLNGKKYYFDNNSKAVTGWQTIDSKKYYFNTNTAEAATGWQTIDGKKYYFNTNTAEAATGWQTIDGKKYYFNTNTAIASTGYTIINGKHFYFNTDGIMQIGVFKGPNGFEYFAPANTDANNIEGQAILYQNEFLTLNGKKYYFGSDSKAVTGWRIINNKKYYFNPNNAIAAIHLCTINNDKYYFSYDGILQNGYITIERNNFYFDANNESKMVTGVFKGPNGFEYFAPANTHNNNIEGQAIVYQNKFLTLNGKKYYFDNDSKAVTGWQTIDGKKYYFNLNTAEAATGWQTIDGKKYYFNLNTAEAATGWQTIDGKKYYFNTNTFIASTGYTSINGKHFYFNTDGIMQIGVFKGPNGFEYFAPANTHNNNIEGQAILYQNKFLTLNGKKYYFGSDSKAVTGLRTIDGKKYYFNTNTAVAVTGWQTINGKKYYFNTNTSIASTGYTIISGKHFYFNTDGIMQIGVFKGPDGFEYFAPANTDANNIEGQAIRYQNRFLYLHDNIYYFGNNSKAATGWVTIDGNRYYFEPNTAMGANGYKTIDNKNFYFRNGLPQIGVFKGSNGFEYFAPANTDANNIEGQAIRYQNRFLHLLGKIYYFGNNSKAVTGWQTINGKVYYFMPDTAMAAAGGLFEIDGVIYFFGVDGVKAPGIYG

SEQ ID NO: 311 - protein, 2709 aa, synthetic construct
  REGION 1..2709: note = Synthetic amino acid sequence
SLISKEELIKLAYSIRPRENEYKTILTNLDEYNKLTTNNNENKYLQLKKLNESIDVFMNKYKTSSRNRALSNLKKDILKEVILIKNSNTSPVEKNLHFVAIGGEVSDIALEYIKQWADINAEYNIKLWYDSEAFLVNTLKKAIVESSTTEALQLLEEEIQNPQFDNMKFYKKRMEFIYDRQKRFINYYKSQINKPTVPTIDDIIKSHLVSEYNRDETLLESYRTNSLRKINSNHGIDIRANSLFTEQELLNIYSQELLNRGNLAAASDIVRLLALKNFGGVYLDVAMLPGIHSDLFKTISRPSSIGLDRWEMIKLEAIMKYKKYINNYTSENFDKLDQQLKDNFKLIIESKSEKSEIFSKLENLNVSDLEIKIAFALGSVINQALISKQGSYLTNLVIEQVKNRYQFLNQHLNPAIESDNNFTDTTKIFHDSLFNSATAENSMFLTKIAPYLQVGFMPEARSTISLSGPGAYASAYYDFINLQENTIEKTLKASDLIEFKFPENNLSQLTEQQINSLASFDQASAKYQFEKYVRDYTGGSLSEDNGVDFNKNTALDKNYLLNNKIPSNNVEEAGSKNYVHYIIQLQGDDISYEATCNLFSKNPKNSIIIQRNMNESAKSYFLSDDGESILELNKYRIPERLKNKEKVKVTFIGHGKDEFNTSEFARLSVDSLSNEISSFLDTIKLDISPKNVEVNLLGANMFSYDFNVEETYPGKLLLSIMDKITSTLPDVNKNSITIGANQYEVRINSEGRKELLAHSGKWINKEEAIMSDLSSKEYIFFDSIDNKLKAKSKNIPGLASISEDIKTLLLDASVSPDTKFILNNLKLNIESSIGDYIYYEKLEPVKNIIHNSIDDLIDEFNLLENVSDELYELKKLNNLDEKYLISFEDISKNNSTYSVRFINKSNGESVYVETEKEIFSKYSEHITKEISTIKNSIITDVNGNLLDNIQLDHTSQVNTLNAAFFIQSLIDYSSNKDVLNDLSTSVKVQLYAQLFSTGLNTIYDSIQLVNLISNAVNDTINVLPTITEGIPIVSTILDGINLGAAIKELLDEHDPLLKKELEAKVGVLAINMSLSIAATVASIVGIGAEVTIFLLPIAGISAGIPSLVNNELILHDKATSVVNYFNHLSESKKYGPLKTEDDKILVPIDDLVISEIDFNNNSIKLGTCNILAMEGGSGHTVTGNIDHFFSSPSISSHIPSLSIYSAIGIETENLDFSKKIMMLPNAPSRVFWWETGAVPGLRSLENDGTRLLDSIRDLYPGKFYWRFYAFFDYAITTLKPVYEDTNIKIKLDKDTRNFIMPTITTNEIRNKLSYSFDGAGGTYSLLLSSYPISTNINLSKDDLWIFNIDNEVREISIENGTIKKGKLIKDVLSKIDINKNKLIIGNQTIDFSGDIDNKDRYIFLTCELDDKISLIIEINLVAKSYSLLLSGNKNYLISNLSNTIEKINTLGLDSKNIAYNYTDESNNKYFGAISKTSQKSIIHYKKDSKNILEFYNDSTLEFNSKDFIAEDINVFMKDDINTITGKYYVDNNTDKGIDFSISLVSKNQVKVNGLYLNESVYSSYLDFVKNSDGHHNTSNFMNLFLDNISFWKLFGFENINFVIDKYFTLVGKTNLGYVEFICDNNKNIDIYFGEWKTSSSKSTIFSGNGRNVVVEPIYNPDTGEDISTSLDFSYEPLYGIDRYINKVLIAPDLYTSLININTNYYSNEYYPEIIVLNPNTFHKKVNINLDSSSFEYKWSTEGSDFILVRYLEESNKKILQKIRIKGILSNTQSFNKMSIDFKDIKKLSLGYIMSNFKSFNSENELDRDHLGFKIIDNKTYYYDEDSKLVKGLININNSLFYFDPIEFNLVTGWQTINGKKYYFDINTGAALTSYKIINGKHFYFNNDGVMQLGVFKGPDGFEYFAPANTQNNNIEGQAIVYQSKFLTLNGKKYYFDNDSKAVTGWRIINNEKYYFNPNNAIAAVGLQVIDNNKYYFNPDTAIISKGWQTVNGSRYYFDTDTAIAFNGYKTIDGKHFYFDSDCVVKIGVFSTSNGFEYFAPANTYNNNIEGQAIVYQSKFLTLNGKKYYFDNNSKAVTGWQTIDSKKYYFNTNTAEAATGWQTIDGKKYYFNTNTAEAATGWQTIDGKKYYFNTNTAIASTGYTIINGKHFYFNTDGIMQIGVFKGPNGFEYFAPANTDANNIEGQAILYQNEFLTLNGKKYYFGSDSKAVTGWRIINNKKYYFNPNNAIAAIHLCTINNDKYYFSYDGILQNGYITIERNNFYFDANNESKMVTGVFKGPNGFEYFAPANTHNNNIEGQAIVYQNKFLTLNGKKYYFDNDSKAVTGWQTIDGKKYYFNLNTAEAATGWQTIDGKKYYFNLNTAEAATGWQTIDGKKYYFNTNTFIASTGYTSINGKHFYFNTDGIMQIGVFKGPNGFEYFAPANTHNNNIEGQAILYQNKFLTLNGKKYYFGSDSKAVTGLRTIDGKKYYFNTNTAVAVTGWQTINGKKYYFNTNTSIASTGYTIISGKHFYFNTDGIMQIGVFKGPDGFEYFAPANTDANNIEGQAIRYQNRFLYLHDNIYYFGNNSKAATGWVTIDGNRYYFEPNTAMGANGYKTIDNKNFYFRNGLPQIGVFKGSNGFEYFAPANTDANNIEGQAIRYQNRFLHLLGKIYYFGNNSKAVTGWQTINGKVYYFMPDTAMAAAGGLFEIDGVIYFFGVDGVKAPGIYG

SEQ ID NO: 312 - protein, 2709 aa, synthetic construct; identical to SEQ ID NO: 287
  REGION 1..2709: note = Synthetic amino acid sequence

SEQ ID NO: 313 - protein, 2709 aa, synthetic construct
  REGION 1..2709: note = Synthetic amino acid sequence
SLISKEELIKLAYSIRPRENEYKTILTNLDEYNKLTTNNNENKYLQLKKLNESIDVFMNKYKNSSRNRALSNLKKDILKEVILIKNSNTSPVEKNLHFVAIGGEVSDIALEYIKQWADINAEYNIKLWYDSEAFLVNTLKKAIVESSTTEALQLLEEEIQNPQFDNMKFYKKRMEFIYDRQKRFVNYYKSQINKPTVPTIDDIIKSHLVSEYNRDETLLESYRTNSLRKINSNHGIDIRANSLFTEQELLNIYSQELLNRGNLAAASDIVRLLALKNFGGVYLDVAMLPGIHSDLFKTISRPSSIGLDRWEMIKLEAIMKYKKYINNYTSENFDKLDQQLKDNFKLIIESKSEKSEIFSKLENLNVSDLEIKIAFALGSVINQALISKQGSYLTNLVIEQVKNRYQFLNQHLNPAIESDNNFTDTTKIFHDSLFNSATAENSMFLTKIAPYLQVGFMPEARSTISLSGPGAYASAYYDFINLQENTIEKTLKASDLIEFKFPENNLSQLTEQQINSLASFDQASAKYQFEKYVRDYTGGSLSEDNEVDFNKNTALDKNYLLNNKIPSNNVEEAGSKNYVHYIIQLQGDDISYEATCNLFSKNPKNSIIIQRNMNESAKSYFLSDDGESILELNKYRIPERLKNKEKVKVTFIGHGKDEFNTSEFARLSVDSLSNEISSFLDTIKLDISPKNVEVNLLGANMFSYDFNVEETYPGKLLLSIMDKITSTLPDVNKDSITIGANQYEVRINSEGRKELLAHSGKWINKEEAIMSDLSSKEYIFFDSIDNKLKAKSKNIPGLASISEDIKTLLLDTSVSPDTKFILNNLKLNIESSVGDYIYYEKLEPVKNIIHNSIDDLIDEFNLLENVSDELYELKKLNNLDEKYLISFEDISKNNSTYSVRFINKSNGESVYVETEKEIFSKYSEHITKEISTIKNSIITDVNGNLLDNIQLDHTSQVNTLNAAFFIQSLIDYSSNKDLLNDLSTSVKVQLYAQLFSTGLNTIYDSIQLVNLISNAVNDTINVLPTITEGIPIVSTILDGINLGAAIKELLDEHDPLLKKELEAKVGVLAINMSLSIAATVASIVGIGAEVTIFLLPIAGISAGIPSLVNNELILHDKATSVVNYFNHLSESKEYGPLKTEDDKILVPIDDLVISEIDFNNNAIKLGTCNILAMEGGSGHTVTGNIDHFFSSPSISSHIPSLSIYSAIGIKTENLDFSKKIMMLPNAPSRVFWWETGAVPGLRSLENNGTKLLDSIRDLYPGKFYWRFYAFFDYAITTLKPVYEDTNIKIKLDKDTRNFIMPTITTNEIRNKLSYSFDGAGGTYSLLLSSYPISTNINLSKDDLWIFNIDNEVREISIENGTIKKGKLIKDVLSKIDINKNKLIIGNQTIDFSGDIDNKDRYIFLTCELDDKISLIIEINLVAKSYSLLLSGDKNYLISNLSNTIEKINTLGLDSKNIAYNYTDESNNKYFGAISKTSQKSIIHYKKDSKNILEFYNGSTLEFNSKDFIAEDINVFMKDDINTITGKYYVDNNTDKSIDFSISLVSKNQAKVNGLYLNESVYSSYLDFVKNADGHHNTSNFMNLFLDNISFWKLFGFENINFVVDKYFTLVGKTNLGYVEFICDNNKNIDIYFGEWKTSSSKSTIFSGNGRNVVVEPIYNPDTGEDISTSLDFSYEPLYGIDRYINKVLIAPDLYTSLININTNYYSNEYYPEIIVLNPNTFHKKVNINLDSSSFEYKWSTEGSDFILVRYLEESNKKILQKIRIKGILSNTQSFNKMSIDFKDIKKLSLVYIMSNFKSFNSENELDRDHLGFKIIDNKTYYYDEASKLVKGLININNSLFYFDPIESNLVTGWQTINGKKYYFDINTGAALTSYKIINGKHFYFNNNGVMQLGVFKGPDRFEYFAPANTQNNNIEGQAIVYQSKFLTLNGKKYYFDNDSKAVTGWRIINNEKYYFNPNNAIAAVGLQVIDNNKYYFNPDTAIISKGWQTVNGSRYYFDTDTAIAFNGYKTIDGKHFYFDSDCVVKIGVFSGSNGFEYFAPANTYNNNIEGQAIVYQSKFLTLNGKKYYFDNNSKAVTGWQTIDSKKYYFNTNTAEAATGWQTIDGKKYYFNTNTAEAATGWQTIDGKKYYFNTNTSIASTGYTIINGKHFYFNTDGIMQIGVFKGPNGFEYFAPANTDANNIEGQAILYQNKFLTLNGKKYYFASDSKAVTGWRIINNKKYYFNPNNAIAATHLYTINNDKYYFSYDGILQNGYITIERNNFYFDANNESKMVTGVFKGPNGFEYFAPANTHNNNIEGQAIVYQNKFLTLNGKKYYFDNDSKAVTGWQTIDGKKYYFNLNTAVAVTGWQTIDGKKYYFNLNTAEAATGWQTIDGKKYYFNTNTFIASTGYTSINGKHFYFNTDGIMQIGVFKGPNGFEYFAPANTHNNNIEGQAILYQNKFLTLNGKKYYFASDSKAVTGLRTIDGKKYYFNTNTAVAATGWQTINGKKYYFNTNTSIASTGYTIINGKHFYFNTDGIMQIGVFKGPDGFEYFAPANTDANNIEGQAIRYQNRFLYLHDNIYYFGNNSKAATGWVTIDGRRYYFEPNTAIGANGYKIIDNKNFYFRNGLPQIGVFKGPNGFEYFAPANTDANNIDGQAIRYQNRFLHLLGNIYYFGNNSKAVTGWQTINGNMYYFMPDTAMAAAGGLFEIDGVIYFFGVDGVKAPGIYG

SEQ ID NO: 314 - protein, 2709 aa, synthetic construct; identical to SEQ ID NO: 294
  REGION 1..2709: note = Synthetic amino acid sequence

SEQ ID NO: 315 - protein, 2709 aa, synthetic construct
  REGION 1..2709: note = Synthetic amino acid sequence
SLISKEELIKLAYSIRPRENEYKTILTNLDEYNKLTTNNNENKYLQLKKLNESIDVFMNKYKNSSRNRALSNLKKDILKEVILIKNSNTSPVEKNLHFVAIGGEVSDIALEYIKQWADINAEYNIKLWYDSEAFLVNTLKKAIVESSTTEALQLLEEEIQNPQFDNMKFYKKRMEFIYDRQKRFVNYYKSQINKPTVPTIDDIIKSHLVSEYNRDETLLESYRTNSLRKINSNHGIDIRANSLFTEQELLNIYSQELLNRGNLAAASDIVRLLALKNFGGVYLDVAMLPGIHSDLFKTISRPSSIGLDRWEMIKLEAIMKYKKYINNYTSENFDKLDQQLKDNFKLIIESKSEKSEIFSKLENLNVSDLEIKIAFALGSVINQALISKQGSYLTNLVIEQVKNRYQFLNQHLNPAIESDNNFTDTTKIFHDSLFNSATAENSMFLTKIAPYLQVGFMPEARSTISLSGPGAYASAYYDFINLQENTIEKTLKASDLIEFKFPENNLSQLTEQQINSLASFDQASAKYQFEKYVRDYTGGSLSEDNEVDFNKNTALDKNYLLNNKIPSNNVEEAGSKNYVHYIIQLQGDDISYEATCNLFSKNPKNSIIIQRNMNESAKSYFLSDDGESILELNKYRIPERLKNKEKVKVTFIGHGKDEFNTSEFARLSVDSLSNEISSFLDTIKLDISPKNVEVNLLGANMFSYDFNVEETYPGKLLLSIMDKITSTLPDVNKDSITIGANQYEVRINSEGRKELLAHSGKWINKEEAIMSDLSSKEYIFFDSIDNKLKAKSKNIPGLASISEDIKTLLLDTSVSPDTKFILNNLKLNIESSVGDYIYYEKLEPVKNIIHNSIDDLIDEFNLLENVSDELYELKKLNNLDEKYLISFEDISKNNSTYSVRFINKSNGESVYVETEKEIFSKYSEHITKEISTIKNSIITDVNGNLLDNIQLDHTSQVNTLNAAFFIQSLIDYSSNKDLLNDLSTSVKVQLYAQLFSTGLNTIYDSIQLVNLISNAVNDTINVLPTITEGIPIVSTILDGINLGAAIKELLDEHDPLLKKELEAKVGVLAINMSLSIAATVASIVGIGAEVTIFLLPIAGISAGIPSLVNNELILHDKATSVVNYFNHLSESKEYGPLKTEDDKILVPIDDLVISEIDFNNNAIKLGTCNILAMEGGSGHTVTGNIDHFFSSPSISSHIPSLSIYSAIGIKTENLDFSKKIMMLPNAPSRVFWWETGAVPGLRSLENNGTKLLDSIRDLYPGKFYWRFYAFFDYAITTLKPVYEDTNIKIKLDKDTRNFIMPTITTNEIRNKLSYSFDGAGGTYSLLLSSYPISTNINLSKDDLWIFNIDNEVREISIENGTIKKGKLIKDVLSKIDINKNKLIIGNQTIDFSGDIDNKDRYIFLTCELDDKISLIIEINLVAKSYSLLLSGDKNYLISNLSNTIEKINTLGLDSKNIAYNYTDESNNKYFGAISKTSQKSIIHYKKDSKNILEFYNGSTLEFNSKDFIAEDINVFMKDDINTITGKYYVDNNTDKSIDFSISLVSKNQAKVNGLYLNESVYSSYLDFVKNADGHHNTSNFMNLFLDNISFWKLFGFENINFVVDKYFTLVGKTNLGYVEFICDNNKNIDIYFGEWKTSSSKSTIFSGNGRNVVVEPIYNPDTGEDISTSLDFSYEPLYGIDRYINKVLIAPDLYTSLININTNYYSNEYYPEIIVLNPNTFHKKVNINLDSSSFEYKWSTEGSDFILVRYLEESNKKILQKIRIKGILSNTQSFNKMSIDFKDIKKLSLVYIMSNFKSFNSENELDRDHLGFKIIDNKTYYYDEASKLVKGLININNSLFYFDPIESNLVTGWQTINGKKYYFDINTGAALTSYKIINGKHFYFNNNGVMQLGVFKGPDRFEYFAPANTQNNNIEGQAIVYQSKFLTLNGKKYYFDNDSKAVTGWRIINNEKYYFNPNNAIAAVGLQVIDNNKYYFNPDTAIISKGWQTVNGSRYYFDTDTAIAFNGYKTIDGKHFYFDSDCVVKIGVFSGSNGFEYFAPANTYNNNIEGQAIVYQSKFLTLNGKKYYFDNNSKAVTGWQTIDSKKYYFNTNTAEAATGWQTIDGKKYYFNTNTAEAATGWQTIDGKKYYFNTNTSIASTGYTIINGKHFYFNTDGIMQIGVFKGPDGFEYFAPANTDANNIEGQAILYQNKFLTLNGKKYYFASDSKAVTGWRIINNKKYYFNPNNAIAATHLYTINNDKYYFSYDGILQNGYITIERNNFYFDANNESKMVTGVFKGPNGFEYFAPANTHNNNIEGQAIVYQNKFLTLNGKKYYFDNDSKAVTGWQTIDGKKYYFNLNTAVAVTGWQTIDGKKYYFNLNTAEAATGWQTIDGKKYYFNTNTFIASTGYTSINGKHFYFNTDGIMQIGVFKGPNGFEYFAPANTHNNNIEGQAILYQNKFLTLNGKKYYFASDSKAVTGLRTIDGKKYYFNTNTAEAATGWQTINGKKYYFNTNTSIASTGYTIINGKHFYFNTDGIMQIGVFKGPDGFEYFAPANTDANNIEGQAIRYQNRFLYLHDNIYYFGNNSKAATGWVTIDGRRYYFEPNTAIGANGYKIIDNKNFYFRNGLPQIGVFKGPNGFEYFAPANTDANNIDGQAIRYQNRFLHLLGNIYYFGNNSKAVTGWQTINGNMYYFMPDTAMAAAGGLFEIDGVIYFFGVDGVKAPGIYG

SEQ ID NO: 316 - protein, 2709 aa, synthetic construct; identical to SEQ ID NO: 287
  REGION 1..2709: note = Synthetic amino acid sequence

SEQ ID NO: 317 - protein, 2709 aa, synthetic construct
  REGION 1..2709: note = Synthetic amino acid sequence
SLISKEELIKLAYSIRPRENEYKTILTNLDEYNKLTTNNNENKYLQLKKLNESIDVFMNKYKNSSRNRALSNLKKDILKEVILIKNSNTSPVEKNLHFVAIGGEVSDIALEYIKQWADINAEYNIKLWYDSEAFLVNTLKKAIVESSTTEALQLLEEEIQNPQFDNMKFYKKRMEFIYDRQKRFVNYYKSQINKPTVPTIDDIIKSHLVSEYNRDETLLESYRTNSLRKINSNHGIDIRANSLFTEQELLNIYSQELLNRGNLAAASDIVRLLALKNFGGVYLDVAMLPGIHSDLFKTISRPSSIGLDRWEMIKLEAIMKYKKYINNYTSENFDKLDQQLKDNFKLIIESKSEKSEIFSKLENLNVSDLEIKIAFALGSVINQALISKQGSYLTNLVIEQVKNRYQFLNQHLNPAIESDNNFTDTTKIFHDSLFNSATAENSMFLTKIAPYLQVGFMPEARSTISLSGPGAYASAYYDFINLQENTIEKTLKASDLIEFKFPENNLSQLTEQQINSLASFDQASAKYQFEKYVRDYTGGSLSEDNEVDFNKNTALDKNYLLNNKIPSNNVEEAGSKNYVHYIIQLQGDDISYEATCNLFSKNPKNSIIIQRNMNESAKSYFLSDDGESILELNKYRIPERLKNKEKVKVTFIGHGKDEFNTSEFARLSVDSLSNEISSFLDTIKLDISPKNVEVNLLGANMFSYDFNVEETYPGKLLLSIMDKITSTLPDVNKDSITIGANQYEVRINSEGRKELLAHSGKWINKEEAIMSDLSSKEYIFFDSIDNKLKAKSKNIPGLASISEDIKTLLLDTSVSPDTKFILNNLKLNIESSVGDYIYYEKLEPVKNIIHNSIDDLIDEFNLLENVSDELYELKKLNNLDEKYLISFEDISKNNSTYSVRFINKSNGESVYVETEKEIFSKYSEHITKEISTIKNSIITDVNGNLLDNIQLDHTSQVNTLNAAFFIQSLIDYSSNKDLLNDLSTSVKVQLYAQLFSTGLNTIYDSIQLVNLISNAVNDTINVLPTITEGIPIVSTILDGINLGAAIKELLDEHDPLLKKELEAKVGVLAINMSLSIAATVASIVGIGAEVTIFLLPIAGISAGIPSLVNNELILHDKATSVVNYFNHLSESKEYGPLKTEDDKILVPIDDLVISEIDFNNNAIKLGTCNILAMEGGSGHTVTGNIDHFFSSPSISSHIPSLSIYSAIGIKTENLDFSKKIMMLPNAPSRVFWWETGAVPGLRSLENNGTKLLDSIRDLYPGKFYWRFYAFFDYAITTLKPVYEDTNIKIKLDKDTRNFIMPTITTNEIRNKLSYSFDGAGGTYSLLLSSYPISTNINLSKDDLWIFNIDNEVREISIENGTIKKGKLIKDVLSKIDINKNKLIIGNQTIDFSGDIDNKDRYIFLTCELDDKISLIIEINLVAKSYSLLLSGDKNYLISNLSNTIEKINTLGLDSKNIAYNYTDESNNKYFGAISKTSQKSIIHYKKDSKNILEFYNGSTLEFNSKDFIAEDINVFMKDDINTITGKYYVDNNTDKSIDFSISLVSKNQAKVNGLYLNESVYSSYLDFVKNADGHHNTSNFMNLFLDNISFWKLFGFENINFVVDKYFTLVGKTNLGYVEFICDNNKNIDIYFGEWKTSSSKSTIFSGNGRNVVVEPIYNPDTGEDISTSLDFSYEPLYGIDRYINKVLIAPDLYTSLININTNYYSNEYYPEIIVLNPNTFHKKVNINLDSSSFEYKWSTEGSDFILVRYLEESNKKILQKIRIKGILSNTQSFNKMSIDFKDIKKLSLVYIMSNFKSFNSENELDRDHLGFKIIDNKTYYYDEASKLVKGLININNSLFYFDPIESNLVTGWQTINGKKYYFDINTGAALTSYKIINGKHFYFNNNGVMQLGVFKGPDRFEYFAPANTQNNNIEGQAIVYQSKFLTLNGKKYYFDNDSKAVTGWRIINNEKYYFNPNNAIAAVGLQVIDNNKYYFNPDTAIISKGWQTVNGSRYYFDTDTAIAFNGYKTIDGKHFYFDSDCVVKIGVFSGSNGFEYFAPANTYNNNIEGQAIVYQSKFLTLNGKKYYFDNNSKAVTGWQTIDSKKYYFNTNTAEAATGWQTIDGKKYYFNTNTAEAATGWQTIDGKKYYFNTNTSIASTGYTIINGKHFYFNTDGIMQIGVFKGPNGFEYFAPANTDANNIEGQAILYQNKFLTLNGKKYYFASDSKAVTGWRIINNKKYYFNPNNAIAATHLYTINNDKYYFSYDGILQNGYITIERNNFYFDANNESKMVTGVFKGPNGFEYFAPANTHNNNIEGQAIVYQNKFLTLNGKKYYFDNDSKAVTGWQTIDGKKYYFNLNTAVAVTGWQTIDGKKYYFNLNTAEAATGWQTIDGKKYYFNTNTFIASTGYTSINGKHFYFNTDGIMQIGVFKGPNGFEYFAPANTHNNNIEGQAILYQNKFLTLNGKKYYFASDSKAVTGLRTIDGKKYYFNTNTAVAVTGWQTINGKKYYFNTNTSIASTGYTIISGKHFYFNTDGIMQIGVFKGPDGFEYFAPANTDANNIEGQAIRYQNRFLYLHDNIYYFGNNSKAATGWVTIDGRRYYFEPNTAIGANGYKIIDNKNFYFRNGLPQIGVFKGPNGFEYFAPANTDANNIEGQAIRYQNRFLHLLGNIYYFGNNSKAVTGWQTINGNMYYFMPDTAMAAAGGLFEIDGVIYFFGVDGVKAPGIYG

SEQ ID NO: 318 - protein, 2709 aa, synthetic construct
  REGION 1..2709: note = Synthetic amino acid sequence
SLISKEELIKLAYSIRPRENEYKTILTNLDEYNKLTTNNNENKYLQLKKLNESIDVFMNKYKNSSRNRALSNLKKDILKEVILIKNSNTSPVEKNLHFVAIGGEVSDIALEYIKQWADINAEYNIKLWYDSEAFLVNTLKKAIVESSTTEALQLLEEEIQNPQFDNMKFYKKRMEFIYDRQKRFVNYYKSQINKPTVPTIDDIIKSHLVSEYNRDETLLESYRTNSLRKINSNHGIDIRANSLFTEQELLNIYSQELLNRGNLAAASDIVRLLALKNFGGVYLDVAMLPGIHSDLFKTISRPSSIGLDRWEMIKLEAIMKYKKYINNYTSENFDKLDQQLKDNFKLIIESKSEKSEIFSKLENLNVSDLEIKIAFALGSVINQALISKQGSYLTNLVIEQVKNRYQFLNQHLNPAIESDNNFTDTTKIFHDSLFNSATAENSMFLTKIAPYLQVGFMPEARSTISLSGPGAYASAYYDFINLQENTIEKTLKASDLIEFKFPENNLSQLTEQQINSLASFDQASAKYQFEKYVRDYTGGSLSEDNEVDFNKNTALDKNYLLNNKIPSNNVEEAGSKNYVHYIIQLQGDDISYEATCNLFSKNPKNSIIIQRNMNESAKSYFLSDDGESILELNKYRIPERLKNKEKVKVTFIGHGKDEFNTSEFARLSVDSLSNEISSFLDTIKLDISPKNVEVNLLGANMFSYDFNVEETYPGKLLLSIMDKITSTLPDVNKDSITIGANQYEVRINSEGRKELLAHSGKWINKEEAIMSDLSSKEYIFFDSIDNKLKAKSKNIPGLASISEDIKTLLLDTSVSPDTKFILNNLKLNIESSVGDYIYYEKLEPVKNIIHNSIDDLIDEFNLLENVSDELYELKKLNNLDEKYLISFEDISKNNSTYSVRFINKSNGESVYVETEKEIFSKYSEHITKEISTIKNSIITDVNGNLLDNIQLDHTSQVNTLNAAFFIQSLIDYSSNKDLLNDLSTSVKVQLYAQLFSTGLNTIYDSIQLVNLISNAVNDTINVLPTITEGIPIVSTILDGINLGAAIKELLDEHDPLLKKELEAKVGVLAINMSLSIAATVASIVGIGAEVTIFLLPIAGISAGIPSLVNNELILHDKATSVVNYFNHLSESKEYGPLKTEDDKILVPIDDLVISEIDFNNNAIKLGTCNILAMEGGSGHTVTGNIDHFFSSPSISSHIPSLSIYSAIGIKTENLDFSKKIMMLPNAPSRVFWWETGAVPGLRSLENNGTKLLDSIRDLYPGKFYWRFYAFFDYAITTLKPVYEDTNIKIKLDKDTRNFIMPTITTNEIRNKLSYSFDGAGGTYSLLLSSYPISTNINLSKDDLWIFNIDNEVREISIENGTIKKGKLIKDVLSKIDINKNKLIIGNQTIDFSGDIDNKDRYIFLTCELDDKISLIIEINLVAKSYSLLLSGDKNYLISNLSNTIEKINTLGLDSKNIAYNYTDESNNKYFGAISKTSQKSIIHYKKDSKNILEFYNGSTLEFNSKDFIAEDINVFMKDDINTITGKYYVDNNTDKSIDFSISLVSKNQAKVNGLYLNESVYSSYLDFVKNADGHHNTSNFMNLFLDNISFWKLFGFENINFVVDKYFTLVGKTNLGYVEFICDNNKNIDIYFGEWKTSSSKSTIFSGNGRNVVVEPIYNPDTGEDISTSLDFSYEPLYGIDRYINKVLIAPDLYTSLININTNYYSNEYYPEIIVLNPNTFHKKVNINLDSSSFEYKWSTEGSDFILVRYLEESNKKILQKIRIKGILSNTQSFNKMSIDFKDIKKLSLVYIMSNFKSFNSENELDRDHLGFKIIDNKTYYYDEASKLVKGLININNSLFYFDPIESNLVTGWQTINGKKYYFDINTGAALTSYKIINGKHFYFNNNGVMQLGVFKGPDRFEYFAPANTQNNNIEGQAIVYQSKFLTLNGKKYYFDNDSKAVTGWRIINNEKYYFNPNNAIAAVGLQVIDNNKYYFNPDTAIISKGWQTVNGSRYYFDTDTAIAFNGYKTIDGKHFYFDSDCVVKIGVFSGSNGFEYFAPANTYNNNIEGQAIVYQSKFLTLNGKKYYFDNNSKAVTGWQTIDSKKYYFNTNTAEAATGWQTIDGKKYYFNTNTAEAATGWQTIDGKKYYFNTNTSIASTGYTIINGKHFYFNTDGIMQIGVFKGPDGFEYFAPANTDANNIEGQAILYQNKFLTLNGKKYYFASDSKAVTGWRIINNKKYYFNPNNAIAATHLYTINNDKYYFSYDGILQNGYITIERNNFYFDANNESKMVTGVFKGPNGFEYFAPANTHNNNIEGQAIVYQNKFLTLNGKKYYFDNDSKAVTGWQTIDGKKYYFNLNTAVAVTGWQTIDGKKYYFNLNTAEAATGWQTIDGKKYYFNTNTFIASTGYTSINGKHFYFNTDGIMQIGVFKGPNGFEYFAPANTHNNNIEGQAILYQNKFLTLNGKKYYFASDSKAVTGLRTIDGKKYYFNTNTAVAVTGWQTINGKKYYFNTNTSIASTGYTIINGKHFYFNTDGIMQIGVFKGPDGFEYFAPANTDANNIEGQAIRYQNRFLYLHDNIYYFGNNSKAATGWVTIDGRRYYFEPNTAIGANGYKIIDNKNFYFRNGLPQIGVFKGPNGFEYFAPANTDANNIDGQAIRYQNRFLHLLGNIYYFGNNSKAVTGWQTINGNMYYFMPDTAMAAAGGLFEIDGVIYFFGVDGVKAPGIYG

SEQ ID NO: 319 - protein, 2709 aa, synthetic construct; identical to SEQ ID NO: 288
  REGION 1..2709: note = Synthetic amino acid sequence

SEQ ID NO: 320 - protein, 2709 aa, synthetic construct
  REGION 1..2709: note = Synthetic amino acid sequence
SLISKEELIKLAYSIRPRENEYKTILTNLDEYNKLTTNNNENKYLQLKKLNESIDVFMNKYKTSSRNRALSNLKKDILKEVILIKNSNTSPVEKNLHFVAIGGEVSDIALEYIKQWADINAEYNIKLWYDSEAFLVNTLKKAIVESSTTEALQLLEEEIQNPQFDNMKFYKKRMEFIYDRQKRFINYYKSQINKPTVPTIDDIIKSHLVSEYNRDETVLESYRTNSLRKINSNHGIDIRANSLFTEQELLNIYSQGLLNRGNLAAASDIVRLLALKNFGGVYLDVAMLPGIHSDLFKTISRPSSIGLDRWEMIKLEAIMKYKKYINNYTSENFDKLDQQLKDNFKLIIESKSEKSEIFSKLENLNVSDLEIKIAFALGSVINQALISKQGSYLTNLVIEQVKNRYQFLNQHLNPAIESDNNFTDTTKIFHDSLFNSATAENSMFLTKIAPYLQVGFMPEARSTISLSGPGAYASAYYDFINLQENTIEKTLKASDLIEFKFPENNLSQLTEQQINSLASFDQASAKYQFEKYVRDYTGGSLSEDNGVDFNKNTALDKNYLLNNKIPSNNVEEAGSKNYVHYIIQLQGDDISYEATCNLFSKNPKNSIIIQRNMNESAKSYFLSDDGESILELNKYRIPERLKNKEKVKVTFIGHGKDEFNTSEFARLSVDSLSNEISSFLDTIKLDISPKNVEVNLLGANMFSYDFNVEETYPGKLLLSIMDKITSTLPDVNKNSITIGANQYEVRINSEGRKELLAHSGKWINKEEAIMSDLSSKEYIFFDSIDNKLKAKSKNIPGLASISEDIKTLLLDASVSPDTKFILNNLKLNIESSIGDYIYYEKLEPVKNIIHNSIDDLIDEFNLLENVSDELYELKKLNNLDEKYLISFEDISKNNSTYSVRFINKSNGESVYVETEKEIFSKYSEHITKEISTIKNSIITDVNGNLLDNIQLDHTSQVNTLNAAFFIQSLIDYSSNKDVLNDLSTSVKVQLYAQLFSTGLNTIYDSIQLVNLISNAVNDTINVLPTITEGIPIVSTILDGINLGAAIKELLDEHDPLLKKELEAKVGVLAINMSLSIAATVASIVGIGAEVTIFLLPIAGISAGIPSLVNNELILHDKATSVVNYFNHLSESKKYGPLKTEDDKILVPIDDLVISEIDFNNNSIKLGTCNILAMEGGSGHTVTGNIDHFFSSPSISSHIPSLSIYSAIGIETENLDFSKKIMMLPNAPSRVFWWETGAVPGLRSLENDGTRLLDSIRDLYPGKFYWRFYAFFDYAITTLKPVYEDTNIKIKLDKDTRNFIMPTITTNEIRNKLSYSFDGAGGTYSLLLSSYPISTNINLSKDDLWIFNIDNEVREISIENGTIKKGKLIKDVLSKIDINKNKLIIGNQTIDFSGDIDNKDRYIFLTCELDDKISLIIEINLVAKSYSLLLSGDKNYLISNLSNIIEKINTLGLDSKNIAYNYTDESNNKYFGAISKTSQKSIIHYKKDSKNILEFYNDSTLEFNSKDFIAEDINVFMKDDINTITGKYYVDNNTDKSIDFSISLVSKNQVKVNGLYLNESVYSSYLDFVKNSDGHHNTSNFMNLFLDNISFWKLFGFENINFVIDKYFTLVGKTNLGYVEFICDNNKNIDIYFGEWKTSSSKSTIFSGNGRNVVVEPIYNPDTGEDISTSLDFSYEPLYGIDRYINKVLIAPDLYTSLININTNYYSNEYYPEIIVLNPNTFHKKVNINLDSSSFEYKWSTEGSDFILVRYLEESNKKILQKIRIKGILSNTQSFNKMSIDFKDIKKLSLGYIMSNFKSFNSENELDRDHLGFKIIDNKTYYYDEDSKLVKGLININNSLFYFDPIEFNLVTGWQTINGKKYYFDINTGAALISYKIINGKHFYFNNDGVMQLGVFKGPDGFEYFAPANTQNNNIEGQAIVYQSKFLTLNGKKYYFDNDSKAVTGWRIINNEKYYFNPNNAIAAVGLQVIDNNKYYFNPDTAIISKGWQTVNGSRYYFDTDTAIAFNGYKTIDGKHFYFDSDCVVKIGVFSTSNGFEYFAPANTYNNNIEGQAIVYQSKFLTLNGKKYYFDNNSKAVTGWQTIDSKKYYFNTNTAEAATGWQTIDGKKYYFNTNTAEAATGWQTIDGKKYYFNTNTAIASTGYTIINGKHFYFNTDGIMQIGVFKGPNGFEYFAPANTDANNIEGQAILYQNEFLTLNGKKYYFGSDSKAVTGWRIINNKKYYFNPNNAIAAIHLCTINNDKYYFSYDGILQNGYITIERNNFYFDANNESKMVTGVFKGPNGFEYFAPANTHNNNIEGQAIVYQNKFLTLNGKKYYFDNDSKAVTGWQTIDGKKYYFNLNTAEAATGWQTIDGKKYYFNLNTAEAATGWQTIDGKKYYFNTNTFIASTGYTSINGKHFYFNTDGIMQIGVFKGPNGFEYFAPANTHNNNIEGQAILYQNKFLTLNGKKYYFGSDSKAVTGLRTIDGKKYYFNTNTAVAVTGWQTINGKKYYFNTNTSIASTGYTIISGKHFYFNTDGIMQIGVFKGPDGFEYFAPANTDANNIEGQAIRYQNRFLYLHDNIYYFGNNSKAATGWVTIDGNRYYFEPNTAMGANGYKTIDNKNFYFRNGLPQIGVFKGSNGFEYFAPANTDANNIEGQAIRYQNRFLHLLGKIYYFGNNSKAVTGWQTINGKVYYFMPDTAMAAAGGLFEIDGVIYFFGVDGVKAPGIYG

SEQ ID NO: 321 - protein, 2709 aa, synthetic construct; identical to SEQ ID NO: 318
  REGION 1..2709: note = Synthetic amino acid sequence

SEQ ID NO: 322 - protein, 2709 aa, synthetic construct
  REGION 1..2709: note = Synthetic amino acid sequence
SLISKEELIKLAYSIRPRENEYKTILTNLDEYNKLTTNNNENKYLQLKKLNESIDVFMNKYKTSSRNRALSNLKKDILKEVILIKNSNTSPVEKNLHFVAIGGEVSDIALEYIKQWADINAEYNIKLWYDSEAFLVNTLKKAIVESSTTEALQLLEEEIQNPQFDNMKFYKKRMEFIYDRQKRFINYYKSQINKPTVPTIDDIIKSHLVSEYNRDETVLESYRTNSLRKINSNHGIDIRANSLFTEQELLNIYSQELLNRGNLAAASDIVRLLALKNFGGVYLDVAMLPGIHSDLFKTISRPSSIGLDRWEMIKLEAIMKYKKYINNYTSENFDKLDQQLKDNFKLIIESKSEKSEIFSKLENLNVSDLEIKIAFALGSVINQALISKQGSYLTNLVIEQVKNRYQFLNQHLNPAIESDNNFTDTTKIFHDSLFNSATAENSMFLTKIAPYLQVGFMPEARSTISLSGPGAYASAYYDFINLQENTIEKTLKASDLIEFKFPENNLSQLTEQQINSLASFDQASAKYQFEKYVRDYTGGSLSEDNGVDFNKNTALDKNYLLNNKIPSNNVEEAGSKNYVHYIIQLQGDDISYEATCNLFSKNPKNSIIIQRNMNESAKSYFLSDDGESILELNKYRIPERLKNKEKVKVTFIGHGKDEFNTSEFARLSVDSLSNEISSFLDTIKLDISPKNVEVNLLGANMFSYDFNVEETYPGKLLLSIMDKITSTLPDVNKNSITIGANQYEVRINSEGRKELLAHSGKWINKEEAIMSDLSSKEYIFFDSIDNKLKAKSKNIPGLASISEDIKTLLLDASVSPDTKFILNNLKLNIESSIGDYIYYEKLEPVKNIIHNSIDDLIDEFNLLENVSDELYELKKLNNLDEKYLISFEDISKNNSTYSVRFINKSNGESVYVETEKEIFSKYSEHITKEISTIKNSIITDVNGNLLDNIQLDHTSQVNTLNAAFFIQSLIDYSSNKDVLNDLSTSVKVQLYAQLFSTGLNTIYDSIQLVNLISNAVNDTINVLPTITEGIPIVSTILDGINLGAAIKELLDEHDPLLKKELEAKVGVLAINMSLSIAATVASIVGIGAEVTIFLLPIAGISAGIPSLVNNELILHDKATSVVNYFNHLSESKKYGPLKTEDDKILVPIDDLVISEIDFNNNSIKLGTCNILAMEGGSGHTVTGNIDHFFSSPSISSHIPSLSIYSAIGIETENLDFSKKIMMLPNAPSRVFWWETGAVPGLRSLENDGTRLLDSIRDLYPGKFYWRFYAFFDYAITTLKPVYENTNIKIKLDKDTRNFIMPTITTNEIRNKLSYSFDGAGGTYSLLLSSYPISTNINLSKDDLWIFNIDNEVREISIENGTIKKGKLIKDVLSKIDINKNKLIIGNQTIDFSGDIDNKDRYIFLTCELDDKISLIIEINLVAKSYSLLLSGDKNYLISNLSNTIEKINTLGLDSKNIAYNYTDESNNKYFGAISKTSQKSIIHYKKDSKNILEFYNDSTLEFNSKDFIAEDINVFMKDDINTITGKYYVDNNTDKSIDFSISLVSKNQVKVNGLYLNESVYSSYLDFVKNSDGHHNTSNFMNLFLDNISFWKLFGFENINFVIDKYFTLVGKTNLGYVEFICDNNKNIDIYFGEWKTSSSKSTIFSGNGRNVVVEPIYNPDTGEDISTSLDFSYEPLYGIDRYINKVLIAPDLYTSLININTNYYSNEYYPEIIVLNPNTFHKKVNINLDSSSFEYKWSTEGSDFILVRYLEESNKKILQKIRIKGILSNTQSFNKMSIDFKDIKKLSLGYIMSNFKSFNSENELDRDHLGFKIIDNKTYYYDEDSKLVKGLININNSLFYFDPIEFNLVTGWQTINGKKYYFDINTGAALTSYKIINGKHFYFNNDGVMQLGVFKGPDGFEYFAPANTQNNNIEGQAIVYQSKFLTLNGKKYYFDNDSKAVTGWRIINNEKYYFNPNNAIAAVGLQVIDNNKYYFNPDTAIISKGWQTVNGSRYYFDTDTAIAFNGYKTIDGKHFYFDSDCVVKIGVFSTSNGFEYFAPANTYNNNIEGQAIVYQSKFLTLNGKKYYFDDNSKAVTGWQTIDSKKYYFNTNTAEAATGWQTIDGKKYYFNTNTAEAATGWQTIDGKKYYFNTNTSIASTGYTSINGKHFYFNTDGIMQIGVFKGPNGFEYFAPANTDANNIEGQAILYQNEFLTLNGKKYYFGSDSKAVTGWRIINNKKYYFNPNNAIAAIHLCTINNDKYYFSYDGILQNGYITIERNNFYFDANNESKMVTGVFKGPNGFEYFAPANTHNNNIEGQAIVYQNKFLTLNGKKYYFDNDSKAVTGWQTIDGKKYYFNLNTAEAATGWQTIDGKKYYFNLNTAEAATGWQTIDGKKYYFNTNTFIASTGYTSINGKHFYFNTDGIMQIGVFKGPNGFEYFAPANTHNNNIEGQAILYQNKFLTLNGKKYYFGSDSKAVTGLRTIDGKKYYFNTNTAVAVTGWQTINGKKYYFNTNTSIASTGYTIISGKHFYFNTDGIMQIGVFKGPDGFEYFAPANTDANNIEGQAIRYQNRFLYLHDNIYYFGNNSKAATGWVTIDGNRYYFEPNTAMGANGYKTIDNKNFYFRNGLPQIGVFKGSNGFEYFAPANTDANNIEGQAIRYQNRFLHLLGKIYYFGNNSKAVTGWQTINGKVYYFMPDTAMAAAGGLFEIDGVIYFFGVDGVKAPGIYG

SEQ ID NO: 323 - protein, 2709 aa, synthetic construct; identical to SEQ ID NO: 210
  REGION 1..2709: note = Synthetic amino acid sequence

SEQ ID NO: 324 - protein, 2365 aa, synthetic construct
  REGION 1..2365: note = Synthetic amino acid sequence
SLVNRKQLEKMANVRFRVQEDEYVAILDALEEYHNMSENTVVEKYLKLKDINSLTDIYIDTYKKSGRNKALKKFKEYLVTEVLELKNNNLTPVEKNLHFVAIGGQINDTAINYINQWKDVNSDYNVNVFYDSNAFLINTLKKTIVESATNDTLESFRENLNDPRFDYNKFYRKRMEIIYDKQKNFINYYKTQREENPDLIIDDIVKIYLSNEYSKDIDELNSYIEESLNKVTENSGNDVRNFEEFKGGESFKLYEQELVERWNLAAASDILRISALKEVGGVYLDVAMLPGIQPDLFESIEKPSSVTVDFWEMVKLEAIMKYKEYIPGYTSEHFDMLDEEVQSSFESVLASKSDKSEIFSSLGDMEASPLEVKIAFNSKGIINQGLISVKDSYCSNLIVKQIENRYKILNNSLNPAISEDNDFNTTTNAFIDSIMAEANADNGRFMMELGKYLRVGFFPDVKTTINLSGPEAYAAAYQDLLMFKEGSMNIHLIEADLRNFEISKTNISQSTEHQMASLASFDDARAKAQFEEYKKNYFEGSLGEDDNLDFSQNTVVDKEYLLEKISSLARSSERGYIHYIVQLQGDKISYEAACNLFAKTPYDSVLFQKNIEDSEIAYYYNPGDGEIQEIDKYKIPSIISDRPKIKLTFIGHGKDEFNTDIFAGLDVDSLSTEIETAIDLAKEDISPKSIEINLLGANMFSYSVNVEETYPGKLLLRVKDKVSELMPSISQDSIIVSANQYEVRINSEGRRELLDHSGEWINKEESIIKDISSKEYISFNPKENKIIVKSKNLPELSTLLQEIRNNSNSSDIELEEKVMLAECEINVISNIDTQVVEGRIEEAKSLTSDSINYIKNEFKLIESISDALYDLKQQNELEESHFISFEDILETDEGFSIRFIDKETGESIFVETEKAIFSEYANHITEEISKIKGTIFDTVNGKLVKKVNLDATHEVNTLNAAFFIQSLIEYNSSKESLSNLSVAMKVQVYAQLFSTGLNTITDAAKVVELVSTALDETIDLLPTLSEGLPVIATIIDGVSLGAAIKELSETSDPLLRQEIEAKIGIMAVNLTAATTAIITSSLGIASGFSILLVPLAGISAGIPSLVNNELILRDKATKVVDYFSHISLAESEGAFTSLDDKIMMPQDDLVISEIDFNNNSITLGKCEIWRMEGGSGHTVTDDIDHFFSAPSITYREPHLSIYDVLEVQKEELDLSKDLMVLPNAPNRVFAWETGWTPGLRSLENDGTKLLDRIRDNYEGEFYWRYFAFIADALITTLKPRYEDTNIRINLDSNTRSFIVPVITTEYIREKLSYSFYGSGGTYALSLSQYNMNINIELNENDTWVIDVDNVVRDVTIESDKIKKGDLIENILSKLSIEDNKIILDNHEINFSGTLNGGNGFVSLTFSILEGINAVIEVDLLSKSYKVLISGELKTLMANSNSVQQKIDYIGLNSELQKNIPYSFMDDKGKENGFINCSTKEGLFVSELSDVVLISKVYMDNSKPLFGYCSNDLKDVKVITKDDVIILTGYYLKDDIKISLSFTIQDENTIKLNGVYLDENGVAEILKFMNKKGSTNTSDSLMSFLESMNIKSIFINSLQSNTKLILDTNFIISGTTSIGQFEFICDKDNNIQPYFIKFNTLETKYTLYVGNRQNMIVEPNYDLDDSGDISSTVINFSQKYLYGIDSCVNKVIISPNIYTDEINITPIYEANNTYPEVIVLDTNYISEKINININDLSIRYVWSNDGSDFILMSTDEENKVSQVKIRFTNVFKGNTISDKISFNFSDKQDVSINKVISTFTPSYYVEGLLNYDLGLISLYNEKFYINNFGMMVSGLVYINDSLYYFKPPIKNLITGFTTIGDDKYYFNPDNGGAASVGETIIDGKNYYFSQNGVLQTGVFSTEDGFKYFAPADTLDENLEGEAIDFTGKLTIDENVYYFGDNYRAAIEWQTLDDEVYYFSTDTGRAFKGLNQIGDDKFYFNSDGIMQKGFVNINDKTFYFDDSGVMKSGYTEIDGKYFYFAENGEMQIGVFNTADGFKYFAHHDEDLGNEEGEALSYSGILNFNNKIYYFDDSFTAVVGWKDLEDGSKYYFDEDTAEAYIGISIINDGKYYFNDSGIMQIGFVTINNEVFYFSDSGIVESGMQNIDDNYFYIDENGLVQIGVFDTSDGYKYFAPANTVNDNIYGQAVEYSGLVRVGEDVYYFGETYTIETGWIYDMENESDKYYFDPETKKAYKGINVIDDIKYYFDENGIMRTGLITFEDNHYYFNEDGIMQYGYLNIEDKTFYFSEDGIMQIGVFNTPDGFKYFAHQNTLDENFEGESINYTGWLDLDEKRYYFTDEYIAATGSVIIDGEEYYFDPDTAQLVISE

SEQ ID NO: 325 - protein, 2365 aa, synthetic construct
  REGION 1..2365: note = Synthetic amino acid sequence
SLVNRKQLEKMANVRFRTQEDEYVAILDALEEYHNMSENTVVEKYLKLKDINSLTDIYIDTYKKSGRNKALKKFKEYLVTEVLELKNNNLTPVEKNLHFVAIGGQINDTAINYINQWKDVNSDYNVNVFYDSNAFLINTLKKTVVESAINDTLESFRENLNDPRFDYNKFFRKRMEIIYDKQKNFINYYKAQREENPELIIDDIVKTYLSNEYSKEIDELNTYIEESLNKITQNSGNDVRNFEEFKNGESFNLYEQELVERWNLAAASDILRISALKEIGGMYLDVAMLPGIQPDLFESIEKPSSVTVDFWEMTKLEAIMKYKEYIPEYTSEHFDMLDEEVQSSFESVLASKSDKSEIFSSLGDMEASPLEVKIAFNSKGIINQGLISVKDSYCSNLIVKQIENRYKILNNSLNPAISEDNDFNTTTNTFIDSIMAEANADNGRFMMELGKYLRVGFFPDVKTTINLSGPEAYAAAYQDLLMFKEGSMNIHLIEADLRNFEISKTNISQSTEHQMASLASFDDARAKAQFEEYKRNYFEGSLGEDDNLDFSQNIVVDKEYLLEKISSLARSSERGYIHYIVQLQGDKISYEAACNLFAKTPYDSVLFQKNIEDSEIAYYYNPGDGEIQEIDKYKIPSIISDRPKIKLTFIGHGKDEFNTDIFAGFDVDSLSTEIEAAIDLAKEDISPKSIEINLLGANMFSYSINVEETYPGKLLLKVKDKISELMPSISQDSIIVSANQYEVRINSEGRRELLDHSGEWINKEESIIKDISSKEYISFNPKENKITVKSKNLPELSTLLQEIRNNSNSSDIELEEKVMLTECEINVISNIDTQIVEERIEEAKNLTSDSINYIKDEFKLIESISDALCDLKQQNELEDSHFISFEDISETDEGFSIRFINKETGESIFVETEKTIFSEYANHITEEISKIKGTIFDTVNGKLVKKVNLDTTHEVNTLNAAFFIQSLIEYNSSKESLSNLSVAMKVQVYAQLFSTGLNTITDAAKVVELVSTALDETIDLLPTLSEGLPIIATIIDGVSLGAAIKELSETSDPLLRQEIEAKIGIMAVNLTTATTAIITSSLGVASGFSILLVPLAGISAGIPSLVNNELVLRDKATKVVDYFKHVSLVETEGVFTLLDDKIMMPQDDLVISEIDFNNNSIVLGKCEIWRMEGGSGHTVTDDIDHFFSAPSITYREPHLSIYDVLEVQKEELDLSKDLMVLPNAPNRVFAWETGWTPGLRSLENDGTKLLDRIRDNYEGEFYWRYFAFIADALITTLKPRYEDTNIRINLDSNTRSFIVPIITTEYIREKLSYSFYGSGGTYALSLSQYNMGINIELSESDVWIIDVDNVVRDVTIESDKIKKGDLIEGILSTLSIEENKIILNSHEINFSGEVNGSNGFVSLTFSILEGINAIIEVDLLSKSYKLLISGELKILMLNSNHIQQKIDYIGFNSELQKNIPYSFVDSEGKENGFINGSTKEGLFVSELPDVVLISKVYMDDSKPSFGYYSNNLKDVKVITKDNVNILTGYYLKDDIKISLSLTLQDEKTIKLNSVHLDESGVAEILKFMNRKGNTNTSDSLMSFLESMNIKSIFVNFLQSNIKFILDANFIISGTTSIGQFEFICDENDNIQPYFIKFNTLETNYTLYVGNRQNMIVEPNYDLDDSGDISSTVINFSQKYLYGIDSCVNKVVISPNIYTDEINITPVYETNNTYPEVIVLDANYINEKINVNINDLSIRYVWSNDGNDFILMSTSEENKVSQVKIRFVNVFKDKTLANKLSFNFSDKQDVPVSEIILSFTPSYYEDGLIGYDLGLVSLYNEKFYINNFGMMVSGLIYINDSLYYFKPPVNNLITGFVTVGDDKYYFNPINGGAASIGETIIDDKNYYFNQSGVLQTGVFSTEDGFKYFAPANTLDENLEGEAIDFTGKLIIDENIYYFDDNYRGAVEWKELDGEMHYFSPETGKAFKGLNQIGDYKYYFNSDGVMQKGFVSINDNKHYFDDSGVMKVGYTEIDGKHFYFAENGEMQIGVFNTEDGFKYFAHHNEDLGNEEGEEISYSGILNFNNKIYYFDDSFTAVVGWKDLEDGSKYYFDEDTAEAYIGLSLINDGQYYFNDDGIMQVGFVTINDKVFYFSDSGIIESGVQNIDDNYFYIDDNGIVQIGVFDTSDGYKYFAPANTVNDNIYGQAVEYSGLVRVGEDVYYFGETYTIETGWIYDMENESDKYYFNPETKKACKGINLIDDIKYYFDEKGIMRTGLISFENNNYYFNENGEMQFGYINIEDKMFYFGEDGVMQIGVFNTPDGFKYFAHQNTLDENFEGESINYTGWLDLDEKRYYFTDEYIAATGSVIIDGEEYYFDPDTAQLVISE

SEQ ID NO: 326 - protein, 2365 aa, synthetic construct; identical to SEQ ID NO: 324
  REGION 1..2365: note = Synthetic amino acid sequence

SEQ ID NO: 327 - protein, 2365 aa, synthetic construct; identical to SEQ ID NO: 325
  REGION 1..2365: note = Synthetic amino acid sequence

SEQ ID NO: 328 - protein, 2365 aa, synthetic construct
  REGION 1..2365: note = Synthetic amino acid sequence
SLVNRKQLEKMANVRFRTQEDEYVAILDALEEYHNMSENTVVEKYLKLKDINSLTDIYIDTYKKSGRNKALKKFKEYLVTEVLELKNNNLTPVEKNLHFVAIGGQINDTAINYINQWKDVNSDYNVNVFYDSNAFLINTLKKTVVESAINDTLESFRENLNDPRFDYNKFFRKRMEIIYDKQKNFINYYKAQREENPELIIDDIVKTYLSNEYSKEIDELNTYIEESLNKITQNSGNDVRNFEEFKNGESFNLYEQELVERWNLAAASDILRISALKEIGGMYLDVAMLPGIQPDLFESIEKPSSVTVDFWEMTKLEAIMKYKEYIPEYTSEHFDMLDEEVQSSFESVLASKSDKSEIFSSLGDMEASPLEVKIAFNSKGIINQGLISVKDSYCSNLIVKQIENRYKILNNSLNPAISEDNDFNTTTNTFIDSIMAEANADNGRFMMELGKYLRVGFFPDVKTTINLSGPEAYAAAYQDLLMFKEGSMNIHLIEADLRNFEISKTNISQSTEHQMASLASFDDARAKAQFEEYKRNYFEGSLGEDDNLDFSQNIVVDKEYLLEKISSLARSSERGYIHYIVQLQGDKISYEAACNLFAKTPYDSVLFQKNIEDSEIAYYYNPGDGEIQEIDKYKIPSIISDRPKIKLTFIGHGKDEFNTDIFAGFDVDSLSTEIEAAIDLAKEDISPKSIEINLLGANMFSYSINVEETYPGKLLLKVKDKISELMPSISQDSIIVSANQYEVRINSEGRRELLDHSGEWINKEESIIKDISSKEYISFNPKENKITVKSKNLPELSTLLQEIRNNSNSSDIELEEKVMLTECEINVISNIDTQIVEERIEEAKNLTSDSINYIKDEFKLIESISDALCDLKQQNELEDSHFISFEDISETDEGFSIRFINKETGESIFVETEKTIFSEYANHITEEISKIKGTIFDTVNGKLVKKVNLDTTHEVNTLNAAFFIQSLIEYNSSKESLSNLSVAMKVQVYAQLFSTGLNTITDAAKVVELVSTALDETIDLLPTLSEGLPIIATIIDGVSLGAAIKELSETSDPLLRQEIEAKIGIMAVNLTTATTAIITSSLGIASGFSILLVPLAGISAGIPSLVNNELVLRDKATKVVDYFKHVSLVETEGVFTLLDDKIMMPQDDLVISEIDFNNNSIVLGKCEIWRMEGGSGHTVTDDIDHFFSAPSITYREPHLSIYDVLEVQKEELDLSKDLMVLPNAPNRVFAWETGWTPGLRSLENDGTKLLDRIRDNYEGEFYWRYFAFIADALITTLKPRYEDTNIRINLDSNTRSFIVPIITTEYIREKLSYSFYGSGGTYALSLSQYNMGINIELSESDVWIIDVDNVVRDVTIESDKIKKGDLIEGILSTLSIEENKIILNSHEINFSGEVNGSNGFVSLTFSILEGINAIIEVDLLSKSYKLLISGELKILMLNSNHIQQKIDYIGFNSELQKNIPYRFVDSEGKENGFINGSTKEGLFVSELPDVVLISKVYMDDSKPSFGYYSNNLKDVKVITKDNVNILTGYYLKDDIKISLSLTLQDEKTIKLNSVHLDESGVAEILKFMNRKGNTNTSDSLMSFLESMNIKSIFVNFLQSNIKFILDANFIISGTTSIGQFEFICDENDNIQPYFIKFNTLETNYTLYVGNRQNMIVEPNYDLDDSGDISSTVINFSQKYLYGIDSCVNKVVISPNIYTDEINITPVYETNNTYPEVIVLDANYINEKINVNINDLSIRYVWSNDGNDFILMSTSEENKVSQVKIRFVNVFKDKTLANKLSFNFSDKQDVPVSEIILSFTPSYYEDGLIGYDLGLVSLYNEKFYINNFGMMVSGLIYINDSLYYFKPPVNNLITGFVTVGDDKYYFNPINGGAASIGETIIDDKNYYFNQSGVLQTGVFSTEDGFKYFAPANTLDENLEGEAIDFTGKLIIDENIYYFDDNYRGAVEWKELDGEMHYFSPETGKAFKGLNQIGDDKYYFNSDGVMQKGFVSINDNKHYFDDSGVMKVGYTEIDGKHFYFAENGEMQIGVFNTEDGFKYFAHHNEDLGNEEGEEISYSGILNFNNKIYYFDDSFTAVVGWKDLEDGSKYYFDEDTAEAYIGLSLINDGQYYFNDDGIMQVGFVTINDKVFYFSDSGIIESGVQNIDDNYFYIDDNGIVQIGVFDTSDGYKYFAPANTVNDNIYGQAVEYSGLVRVGEDVYYFGETYTIETGWIYDMENESDKYYFNPETKKACKGINLIDDIKYYFDEKGIMRTGLISFENNNYYFNENGEMQFGYINIEDKMFYFGEDGVMQIGVFNTPDGFKYFAHQNTLDENFEGESINYTGWLDLDEKRYYFTDEYIAATGSVIIDGEEYYFDPDTAQLVISE

SEQ ID NO: 329 - protein, 2365 aa, synthetic construct
  REGION 1..2365: note = Synthetic amino acid sequence
SLVNRKQLEKMANVRFRTQEDEYVAILDALEEYHNMSENTVVEKYLKLKDINSLTDIYIDTYKKSGRNKALKKFKEYLVTEVLELKNNNLTPVEKNLHFVAIGGQINDTAINYINQWKDVNSDYNVNVFYDSNAFLINTLKKTVVESAINDTLESFRENLNDPRFDYNKFFRKRMEIIYDKQKNFINYYKAQREENPELIIDDIVKTYLSNEYSKEIDELNTYIEESLNKITQNSGNDVRNFEEFKNGESFNLYEQELVERWNLAAASDILRISALKEIGGMYLDVAMLPGIQPDLFESIEKPSSVTVDFWEMTKLEAIMKYKEYIPEYTSEHFDMLDEEVQSSFESVLASKSDKSEIFSSLGDMEASPLEVKIAFNSKGIINQGLISVKDSYCSNLIVKQIENRYKILNNSLNPAISEDNDFNTTTNTFIDSIMAEANADNGRFMMELGKYLRVGFFPDVKTTINLSGPEAYAAAYQDLLMFKEGSMNIHLIEADLRNFEISKTNISQSTEHQMASLASFDDARAKAQFEEYKRNYFEGSLGEDDNLDFSQNIVVDKEYLLEKISSLARSSERGYIHYIVQLQGDKISYEAACNLFAKTPYDSVLFQKNIEDSEIAYYYNPGDGEIQEIDKYKIPSIISDRPKIKLTFIGHGKDEFNTDIFAGFDVDSLSTEIEAAIDLAKEDISPKSIEINLLGANMFSYSINVEETYPGKLLLKVKDKISELMPSISQDSIIVSANQYEVRINSEGRRELLDHSGEWINKEESIIKDISSKEYISFNPKENKITVKSKNLPELSTLLQEIRNNSNSSDIELEEKVMLTECEINVISNIDTQIVEERIEEAKNLTSDSINYIKDEFKLIESISDALCDLKQQNELEDSHFISFEDISETDEGFSIRFINKETGESIFVETEKTIFSEYANHITEEISKIKGTIFDTVNGKLVKKVNLDTTHEVNTLNAAFFIQSLIEYNSSKESLSNLSVAMKVQVYAQLFSTGLNTITDAAKVVELVSTALDETIDLLPTLSEGLPIIATIIDGVSLGAAIKELSETSDPLLRQEIEAKIGIMAVNLTTATTAIITSSLGIASGFSILLVPLAGISAGIPSLVNNELVLRDKATKVVDYFKHVSLVETEGVFTLLDDKIMMPQDDLVISEIDFNNNSIVLGKCEIWRMEGGSGHTVTDDIDHFFSAPSITYREPHLSIYDVLEVQKEELDLSKDLMVLPNAPNRVFAWETGWTPGLRSLENDGTKLLDRIRDNYEGEFYWRYFAFIADALITTLKPRYEDTNIRINLDSNTRSFIVPIITTEYIREKLSYSFYGSGGTYALSLSQYNMGINIELSESDVWIIDVDNVVRDVTIESDKIKKGDLIEGILSTLSIEENKIILNSHEINFSGEVNGSNGFVSLTFSILEGINAIIEVDLLSKSYKLLISGELKILMLNSNHIQQKIDYIGFNSELQKNIPYSFVDSEGKENGFINGSTKEGLFVSELPDVVLISKVYMDDSKPSFGYYSNNLKDVKVITKDNVNILTGYYLKDDIKISLSLTLQDEKTIKLNSVHLDESGVAEILKFMNRKGNTNTSDSLMSFLESMNIKSIFVNFLQSNIKFILDANFIISGTTSIGQFEFICDENDNIQPYFIKFNTLETNYTLYVGNRQNMIVEPNYDLDDSGDISSTVINFSQKYLYGIDSCVNKVVISPNIYTDEINITPVYETNNTYPEVIVLDANYINEKINVNINDLSIRYVWSNDGNDFILMSTSEENKVSQVKIRFVNVFKDKTLANKLSFNFSDKQDVPVSEIILSFTPSYYEDGLIGYDLGLVSLYNEKFYINNFGMMVSGLIYINDSLYYFKPPVNNLITGFVTVGDDKYYFNPINGGAASIGETIIDDKNYYFNQSGVLQTGVFSTEDGFKYFAPANTLDENLEGEAIDFTGKLIIDENIYYFDDNYRGAVEWKELDGEMHYFSPETGKAFKGLNQIGDDKYYFNSDGVMQKGFVSINDNKHYFDDSGVMKVGYTEIDGKHFYFAENGEMQIGVFNTEDGFKYFAHHNEDLGNEEGEEISYSGILNFNNKIYYFDDSFTAVVGWKDLEDGSKYYFDEDTAEAYIGLSLINDGQYYFNDDGIMQVGFVTINDKVFYFSDSGIIESGVQNIDDNYFYIDDNGIVQIGVFDTSDGYKYFAPANTVNDNIYGQAVEYSGLVRVGEDVYYFGETYTIETGWIYDMENESDKYYFNPETKKACKGINLIDDIKYYFDEKGIMRTGLISFENNNYYFNENGEMQFGYINIEDKMFYFGEDGVMQIGVFNTPDGFKYFAHQNTLDENFEGESINYTGWLDLDEKRYYFTDEYIAATGSVIIDGEEYYFDPDTAQLVISE

SEQ ID NO: 330 - protein, 2365 aa, synthetic construct
  REGION 1..2365: note = Synthetic amino acid sequence
SLVNRKQLEKMANVRFRTQEDEYVAILDALEEYHNMSENTVVEKYLKLKDINSLTDIYIDTYKKSGRNKALKKFKEYLVTEVLELKNNNLTPVEKNLHFVAIGGQINDTAINYINQWKDVNSDYNVNVFYDSNAFLINTLKKTIVESAINDTLESFRENLNNPRFDYNKFFRKRMEIIYDKQKNFINYYKAQREENPELIIDDIVKIYLSNEYSKEIDELNTYIEESLNKIKQNSGNDVRNFEEFKNGESFKLYEQELVERWNLAAASDILRISALKEIGGMYLDVAMLPGIQPDLFESIEKPSSVTVDFWEMTKLEAIMKYKEYIPGYTSEHFDMLDEEVQSSFESALASKSDKSEIFSSLGDMEASPLEVKIAFNSKGIINQGLISVKDSYCSNLIVKQIENRYKILNNSLNPAISEDNDFNTTTNTFIDSIMAEANADNGRFMMELGKYLRVGFFPDVKTTVNLSGPEAYAAAYQDLLMFKEGSMNIHLIEADLRNFEISKTNISQSTEQQMASLATFDDARAKVQFEEYKRNYFEGSLGEDDNLDFSQNIVVDKEYLLEKISSLARSSERGYIHYIVQLQGDKISYEAACNLFAKTPYDSILFQKNIENSEVAYYYNPGDGEIQEIDKYRIPSIISDRPKIKLTFIGHGKDEFNTDIFAGLDVDSLSTEIETAIDLAKEDISSKSIEINLLGANMFSYSINVEETYPGKLLLKVKDKISELMPSISQDSIIVSANQYEVRINNEGRRELLDHSGEWINKEESIIKDISSKEYISFNPKENKITVKSKNLPELSTLLQEIRNNSNLSDIELEEKVMLAECEINVISNIDTQIVEERIEEAKNLTSDSINYIKNEFKLIESISDSLYDLKQQNELDDSHFISFEDISKTEDGFSIRFINKETGESIFVETEKEIFSEYANHIEREISNIKDTIFDTVNGKLVKKVNLDAIHEVNTLNAAFFIQSLIGYSSSKESLSNLSVAMKVQVYAQLFSTGLNTITDAAKVVELVSTALDETIDLLPTLSEGLPVIATIIDGVSLGAAIKELSETSDPLLRQEIEAKIGIMAVNLTAATTAIITSSLGIASGFSILLVPLAGISAGIPSLVNNELVLRDKATKVVDYFKHISLVETEGAFTLLDDKIMIPQDDLVISEIDFNNNSIVLGKCEIWRMEGGSGHTVTNDIDHFFSSPTITYIKPHLSIYDVLEVQKEELDLSKDLMVLPNAPNRVFAWETGWTPGLRSLENEGTKLLDRIRDHYKGEFYWRYFAFIADALITTLKPRYEDTNIRINLDSNNRSFIVPIITTEHIREKLSYSFHGSGGTYALSLSQYNMGINIELSESDVWIIDVDNVVRDVTIDSDKIKKGDLIEGILSTLSIEDNKIILNHHEINFSGDVNGSNGFISLTFSILEGINAIIEVDLLSKSYKLLISGELKILMLNSNHIQQKIDYIGFNSELQKNIPYSFVDSEGKENGFINGSTKEGLFVSELPDVVLISKVYMDDSKPSFGYYSNNLKDVKVITKDNVNILTGYYLKDDIKISLSFTLQDEKTIKLNGVHLDESGVAEILKFMNKKGSTNTSDSLMSFLESVNIKSIFVNFLQSKINFILDANFIISGTTSIGQFEFICDENDNIQPYFIKFNTLETTYTLYVGNRQNMIVEPNYDLDDSGDISSTVINFSQKYLYGIDSCVNKVVISPNIYTDEINITPVYETNNNYPEVIVLDANYINEKINVNINDLSIRYVWSNDGNDFILMSTSEENKVSQVKIRFVNVFKDKTLANKLSFNFSDKQDVPVSEIISAFTPSYYEDGLIGYDLGLVSLYNEKFYINNFGMMVSGLIYINDSLYYFKPPVNNLITGFVTVGDDKYYFNPTNGGAASIGETIINDKNYYFNQSGILQTGVFSTEDGLKYFAPANTLDENLEGEAIDFTGKLIIDENIYYFEDNYRGAVEWKELDGEMYYFSPETGKAFKGLNQIGDDKYYFNSDGIMQKGFVSINDKKYYFDDSGVMKVGYIEIDGKYFYFAENGEMQIGVFNTSDGFKYFAHHNEDLGNEEGEAISYSGILNFNNKIYYFDYSFTAVVGWKDLEDGSKYYFDEDTAEAYVGLSLINDGQYYFNDDGIMQVGFVTINNKVFYFSDSGIIESGVQNIDDNYFYIDEKGIVQIGVFDTSDEYKYFAPANTVNDNIYGQAVDYSGLVRVGEDIYYFGETYTIETGWIYDMENESDKYYFNPETKKACKGINLIDDIKYYFDENGIMRTGLISFENNDYYFNENGEMQFGYINIEDKMFYFGEDGVMQIGVFNTQDGFKYFAHQNTLDENFEGESINYTGWLDLDEKRYYFTDEYIAATGSVIIDGEEYYFDPDTAQLVISE

SEQ ID NO: 331 - protein, 2365 aa, synthetic construct
  REGION 1..2365: note = Synthetic amino acid sequence
SLVNRKQLEKMANVRFRTQEDEYVAILDALEEYHNMSENTVVEKYLKLKDINSLTDIYIDTYKKSGRNKALKKFKEYLVTEVLELKNNNLTPVEKNLHFVAIGGQINDTAINYINQWKDVNSDYNVNVFYDSNAFLINTLKKTVVESAINDTLESFRENLNDPRFDYNKFFRKRMEIIYDKQKNFINYYKAQREENPELIIDDIVKTYLSNEYSKEIDELNTYIEESLNKITQNSGNDVRNFEEFKNGESFNLYEQELVERWNLAAASDILRISALKEIGGMYLDVAMLPGIQPDLFESIEKPSSVTVDFWEMTKLEAIMKYKEYIPEYTSEHFDMLDEEVQSSFESVLASKSDKSEIFSSLGDMEASPLEVKIAFNSKGIINQGLISVKDSYCSNLIVKQIENRYKILNNSLNPAISEDNDFNTTTNTFIDSIMAEANADNGRFMMELGKYLRVGFFPDVKTTINLSGPEAYAAAYQDLLMFKEGSMNIHLIEADLRNFEISKTNISQSTEQQMASLASFDDARAKAQFEEYKRNYFEGSLGEDDNLDFSQNIVVDKEYLLEKISSLARSSERGYIHYIVQLQGDKISYEAACNLFAKTPYDSVLFQKNIEDSEIAYYYNPGDGEIQEIDKYKIPSIISDRPKIKLTFIGHGKDEFNTDIFAGFDVDSLSTEIEAAIDLAKEDISPKSIEINLLGANMFSYSINVEETYPGKLLLKVKDKISELMPSISQDSIIVSANQYEVRINSEGRRELLDHSGEWINKEESIIKDISSKEYISFNPKENKITVKSKNLPELSTLLQEIRNNSNSSDIELEEKVMLTECEINVISNIDTQIVEERIEEAKNLTSDSINYIKDEFKLIESISDALCDLKQQNELEDSHFISFEDISETDEGFSIRFINKETGESIFVETEKTIFSEYANHITEEISKIKGTIFDTVNGKLVKKVNLDTTHEVNTLNAAFFIQSLIEYNSSKESLSNLSVAMKVQVYAQLFSTGLNTITDAAKVVELVSTALDETIDLLPTLSEGLPIIATIIDGVSLGAAIKELSETSDPLLRQEIEAKIGIMAVNLTTATTAIITSSLGIASGFSILLVPLAGISAGIPSLVNNELVLRDKATKVVDYFKHVSLVETEGVFTLLDDKIMMPQDDLVISEIDFNNNSIVLGKCEIWRMEGGSGHTVTDDIDHFFSAPSITYREPHLSIYDVLEVQKEELDLSKDLMVLPNAPNRVFAWETGWTPGLRSLENDGTKLLDRIRDNYEGEFYWRYFAFIADALITTLKPRYEDTNIRINLDSNTRSFIVPIITTEYIREKLSYSFYGSGGTYALSLSQYNMGINIELSESDVWIIDVDNVVRDVTIESDKIKKGDLIEGILSTLSIEENKIILNSHEINFSGEVNGSNGFVSLTFSILEGINAIIEVDLLSKSYKLLISGELKILMLNSNHIQQKIDYIGFNSELQKNIPYSFVDSEGKENGFINGSTKEGLFVSELPDVVLISKVYMDDSKPSFGYYSNNLKDVKVITKDNVNILTGYYLKDDIKISLSLTLQDEKTIKLNSVHLDESGVAEILKFMNRKGNTNTSDSLMSFLESMNIKSIFVNFLQSNIKFILDANFIISGTTSIGQFEFICDENDNIQPYFIKFNTLETNYTLYVGNRQNMIVEPNYDLDDSGDISSTVINFSQKYLYGIDSCVNKVVISPNIYTDEINITPVYETNNTYPEVIVLDANYINEKINVNINDLSIRYVWSNDGNDFILMSTSEENKVSQVKIRFVNVFKDKTLANKLSFNFSDKQDVPVSEIILSFTPSYYEDGLIGYDLGLVSLYNEKFYINNFGMMVSGLIYINDSLYYFKPPVNNLITGFVTVGDDKYYFNPINGGAASIGETIIDDKNYYFNQSGVLQTGVFSTEDGFKYFAPANTLDENLEGEAIDFTGKLIIDENIYYFDDNYRGAVEWKELDGEMHYFSPETGKAFKGLNQIGDDKYYFNSDGVMQKGFVSINDNKHYFDDSGVMKVGYTEIDGKHFYFAENGEMQIGVFNTEDGFKYFAHHNEDLGNEEGEEISYSGILNFNNKIYYFDDSFTAVVGWKDLEDGSKYYFDEDTAEAYIGLSLINDGQYYFNDDGIMQVGFVTINDKVFYFSDSGIIESGVQNIDDNYFYIDDNGIVQIGVFDTSDGYKYFAPANTVNDNIYGQAVEYSGLVRVGEDVYYFGETYTIETGWIYDMENESDKYYFNPETKKACKGINLIDDIKYYFDEKGIMRTGLISFENNNYYFNENGEMQFGYINIEDKMFYFGEDGVMQIGVFNTPDGFKYFAHQNTLDENFEGESINYTGWLDLDEKRYYFTDEYIAATGSVIIDGEEYYFDPDTAQLVISE

SEQ ID NO: 332 - protein, 2365 aa, synthetic construct; identical to SEQ ID NO: 330
  REGION 1..2365: note = Synthetic amino acid sequence

SEQ ID NO: 333 - protein, 2365 aa, synthetic construct; identical to SEQ ID NO: 220
  REGION 1..2365: note = Synthetic amino acid sequence

SEQ ID NO: 334 - protein, 2365 aa, synthetic construct
  REGION 1..2365: note = Synthetic amino acid sequence
SLVNRKQLEKMANVRFRTQEDEYVAILDALEEYHNMSENTVVEKYLKLKDINSLTDIYIDTYKKSGRNKALKKFKEYLVTEVLELKNNNLTPVEKNLHFVAIGGQINDTAINYINQWKDVNSDYNVNVFYDSNAFLINTLKKTVVESAINDTLESFRENLNDPRFDYNKFFRKRMEIIYDKQKNFINYYKAQREENPELIIDDIVKTYLSNEYSKEIDELNTYIEESLNKITQNSGNDVRNFEEFKNGESFNLYEQELVERWNLAAASDILRISALKEIGGMYLDVAMLPGIQPDLFESIEKPSSVTVDFWEMTKLEAIMKYKEYIPEYTSEHFDMLDEEVQSSFESVLASKSDKSEIFSSLGDMEASPLEVKIAFNSKGIINQGLISVKDSYCSNLIVKQIENRYKILNNSLNPAISEDNDFNTTTNTFIDSIMAEANADNGRFMMELGKYLRVGFFPDVKTTINLSGPEAYAAAYQDLLMFKEGSMNIHLIEADLRNFEIFKTNISQSTEQQMASLASFDDARAKAQFEEYKRNYFEGSLGEDDNLDFSQNIVVDKEYLLEKISSLARSSERGYIHYIVQLQGDKISYEAACNLFAKTPYDSVLFQKNIEDSEIAYYYNPGDGEIQEIDKYKIPSIISDRPKIKLTFIGHGKDEFNTDIFAGFDVDSLSTEIEAAIDLAKEDISPKSIEINLLGANMFSYSINVEETYPGKLLLKVKDKISELMPSISQDSIIVSANQYEVRINSEGRRELLDHSGEWINKEESIIKDISSKEYISFNPKENKITVKSKNLPELSTLLQEIRNNSNSSDIELEEKVMLTECEINVISNIDTQIVEERIEEAKNLTSDSINYIKDEFKLIESISDALCDLKQQNELEDSHFISFEDISETDEGFSIRFINKETGESIFVETEKTIFSEYANHITEEISKIKGTIFDTVNGKLVKKVNLDTTHEVNTLNAAFFIQSLIEYNSSKESLSNLSVAMKVQVYAQLFSTGLNTITDAAKVVELVSTALDETIDLLPTLSEGLPIIATIIDGVSLGAAIKELSETSDPLLRQEIEAKIGIMAVNLTTATTAIITSSLGIASGFSILLVPLAGISAGIPSLVNNELVLRDKATKVVDYFKHVSLVETEGVFTLLDDKIMMPQDDLVISEIDFNNNSIVLGKCEIWRMEGGSGHTVTDDIDHFFSAPSITYREPHLSIYDVLEVQKEELDLSKDLMVLPNAPNRVFAWETGWTPGLRSLENDGTKLLDRIRDNYEGEFYWRYFAFIADALITTLKPRYEDTNIRINLDSNTRSFIVPIITTEYIREKLSYSFYGSGGTYALSLSQYNMGINIELSESDVWIIDVDNVVRDVTIESDKIKKGDLIEGILSTLSIEENKIILNSHEINFSGEVNGSNGFVSLTFSILEGINAIIEVDLLSKSYKLLISGELKILMLNSNHIQQKIDYIGFNSELQKNIPYSFVDSEGKENGFINGSTKEGLFVSELPDVVLISKVYMDDSKPSFGYYSNNLKDVKVITKDNVNILTDYYLKDDIKISLSLTLQDEKTIKLNSVHLDESGVAEILKFMNRKGNTNTSDSLMSFLESMNIKSIFVNFLQSNIKFILDANFIISGTTSIGQFEFICDENDNIQPYFIKFNTLETNYTLYVGNRQNMIVEPNYDLDDSGDISSTVINFSQKYLYGIDSCVNKVVISPNIYTDEINITPVYETNNTYPEVIVLDANYINEKINVNINDLSIRYVWSNDGNDFILMSTSEENKVSQVKIRFVNVFKDKTLANKLSFNFSDKQDVPVSEIILSFTPSYYEDGLIGYDLGLVSLYNEKFYINNFGMMVSGLIYINDSLYYFKPPVNNLITGFVTVGDDKYYFNPINGGAASIGETIIDDKNYYFNQSGVLQTGVFSTEDGFKYFAPANTLDENLEGEAIDFTGKLIIDENIYYFDDNYRGAVEWKELDGEMHYFSPETGKAFKGLNQIGDYKYYFNSDGVMQKGFVSINDNKHYFDDSGVMKVGYTEIDGKHFYFAENGEMQIGVFNTEDGFKYFAHHNEDLGNEEGEEISYSGILNFNNKIYYFDDSFTAVVGWKDLEDGSKYYFDEDTAEAYIGLSLINDGQYYFNDDGIMQVGFVTINDKVFYFSDSGIIESGVQNIDDNYFYIDDNGIVQIGVFDTSDGYKYFAPANTVNDNIYGQAVEYSGLVRVGEDVYYFGETYTIETGWIYDMENESDKYYFNPETKKACKGINLIDDIKYYFDEKGIMRTGLISFENNNYYFNENGEMQFGYINIEDKMFYFGEDGVMQIGVFNTPDGFKYFAHQNTLDENFEGESINYTGWLDLDEKRYYFTDEYIAATGSVIIDGEEYYFDPDTAQLVISE

SEQ ID NO: 335 - protein, 2366 aa, synthetic construct
  REGION 1..2366: note = Synthetic amino acid sequence
SLVNRKQLEKMANVRFRVQEDEYVAILDALEEYHNMSENTVVEKYLKLKDINSLTDTYIDTYKKSGRNKALKKFKEYLVIEILELKNSNLTPVEKNLHFIAIGGQINDTAINYINQWKDVNSDYNVNVFYDSNAFLINTLKKTIIESASNDTLESFRENLNDPEFNHTAFFRKRMQIIYDKQQNFINYYKAQKEENPDLIIDDIVKTYLSNEYSKDIDELNAYIEESLNKVTENSGNDVRNFEEFKTGEVFNLYEQELVERWNLAGASDILRVAILKNIGGVYLDVAMLPGIHPDLFKDINKPDSVKTAVDWEEMQLEAIMKHKEYIPEYTSKHFDTLDEEVQSSFESVLASKSDKSEIFLPLGDIEVSPLEVKIAFAKGSIINQALISAKDSYCSDLLIKQIQNRYKILNDTLGPIISQGNDFNTTMNNFGESLGAIANEENISFIAKIGSYLRVGFYPEANTTITLSGPTIYAGAYKDLLTFKEMSIDTSILSSELRNFEFPKVNISQATEQQKNSLAQFNEERAKIQFEEYKKNYFEGALGEDDNLDFSQNTVTDKEYLLEKISSSTKSSERGYVHYIVQLQGDKISYEAACNLFAKNPYDSILFQKNIEDSEVAYYYNPTDSEIQEIDKYRIPDRISDRPKIKLTFIGHGKAEFNTDIFAGLDVDSLSSEIETAIGLAKEDISPKSIEINLLGANMFSYSVNVEETYPGKLLLRVKDKVSELMPSMSQDSIIVSANQYEVRINSEGRRELLDHSGEWINKEESIIKDISSKEYISFNPKENKIIVKSKNLPELSTLLQEIRNNSNSSDIELEEKVMLAECEINVISNIETQVVEERIEEAKSLTSDSINYIKNEFKLIESISDALCDLKQQNELEDSHFISFEDISETDEGFSIRFINKETGESIFVETEKTIFSEYANHITEEISKIKGTIFDTVNGKLVKKVNLDTTHEVNTLNAAFFIQSLIEYNSSKESLSNLSVAMKVQVYAQLFSTGLNTITDAAKVVELVSTALDETIDLLPTLSEGLPIIATIIDGVSLGAAIKELSETSDPLLRQEIEAKIGIMAVNLTTATTAIITSSLGIASGFSILLVPLAGISAGIPSLVNNELVLRDKATKVVDYFKHVSLVETEGVFTLLDDKVMMPQDDLVISEIDFNNNSIVLGKCEIWRMEGGSGHTVTDDIDHFFSAPSITYREPHLSIYDVLEVQKEELDLSKDLMVLPNAPNRVFAWETGWTPGLRSLENDGTKLLDRIRDNYEGEFYWRYFAFIADALITTLKPRYEDTNIRINLDSNTRSFIVPIITTEYIREKLSYSFYGSGGTYALSLSQYNMGINIELSESDVWIIDVDNVVRDVTIESDKIKKGDLIEGILSTLSIEENKIILNSHEINFSGEVNGSNGFVSLTFSILEGINAIIEVDLLSKSYKLLISGELKILMLNSNHIQQKIDYIGFNSELQKNIPYSFVDSEGKENGFINGSTKEGLFVSELPDVVLISKVYMDDSKPSFGYYSNNLKDVKVITKDNVNILTGYYLKDDIKISLSLTLQDEKTIKLNSVHLDESGVAEILKFMNRKGSTNTSDSLMSFLESMNIKSIFVNFLQSNIKFILDANFIISGTTSIGQFEFICDENNNIQPYFIKFNTLETNYTLYVGNRQNMIVEPNYDLDDSGDISSTVINFSQKYLYGIDSCVNKVVISPNIYTDEINITPVYETNNTYPEVIVLDANYINEKINVNINDLSIRYVWSNDGNDFILMSTSEENKVSQVKIRFVNVFKDKTLANKLSFNFSDKQDVPVSEIILSFTPSYYEDGLIGYDLGLVSLYNEKFYINNFGMMVSGLIYINDSLYYFKPPVNNLITGFVTVGDDKYYFNPINGGAASIGETIIDDKNYYFNQSGVLQTGVFSTEDGFKYFAPANTLDENLEGEAIDFTGKLIIDENIYYFEDNYRGAVEWKELDGEMHYFSPETGKAFKGLNQIGDDKYYFNSDGVMQKGFVSINDNKHYFDDSGVMKVGYTEIDGKHFYFAENGEMQIGVFNTEDGFKYFAHHNEDLGNEEGEEISYSGILNFNNKIYYFDDSFTAVVGWKDLEDGSKYYFDEDTAEAYIGLSLINDGQYYFNDDGIMQVGFVTINDKVFYFSDSGIIESGVQNIDDNYFYIDDNGIVQIGVFDTSDGYKYFAPANTVNDNIYGQAVEYSGLVRVGEDVYYFGETYTIETGWIYDMENESDKYYFDPETKKACKGINLIDDIKYYFDEKGIMRTGLISFENNNYYFNENGEMQFGYINIEDKMFYFGEDGVMQIGVFNTPDGFKYFAHQNTLDENFEGESINYTGWLDLDEKRYYFTDEYIAATGSVIIDGEEYYFDPDTAQLVISE

SEQ ID NO: 336 - protein, 2365 aa, synthetic construct
  REGION 1..2365: note = Synthetic amino acid sequence
SLVNRKQLEKMANVRFRTQEDEYVAILDALEEYHNMSENTVVEKYLKLKDINSLTDIYIDTYKKSGRNKALKKFKEYLVTEVLELKNNNLTPVEKNLHFVAIGGQINDTAINYINQWKDVNSDYNVNVFYDSNAFLINTLKKTVVESAINDTLESFRENLNDPRFDYNKFFRKRMEIIYDKQKNFINYYKAQREENPELIIDDIVKTYLSNEYSKEIDELNTYIEESLNKITQNSGNDVRNFEEFKNGESFNLYEQELVERWNLAAASDILRISALKEIGGMYLDVAMLPGIQPDLFESIEKPSSVTVDFWEMTKLEAIMKYKEYIPEYTSEHFDMLDEEVQSSFESVLASKSDKSEIFSSLGDMEASPLEVKIAFNSKGIINQGLISVKDSYCSNLIVKQIENRYKILNNSLNPAISEDNDFNTTTNTFIDSIMAEANADNGRFMMELGKYLRVGFFPDVKTTINLSGPEAYAAAYQDLLMFKEGSMNIHLIEADLRNFEISKTNISQSTEQQMASLASFDDARAKAQFEEYKRNYFEGSLGEDDNLDFSQNIVVDKEYLLEKISSLARSSERGYIHYIVQLQGDKISYEAACNLFAKTPYDSVLFQKNIEDSEIAYYYNPGDGEIQEIDKYKIPSIISDRPKIKLTFIGHGKDEFNTDIFAGFDVDSLSTEIEAAIDLAKEDISPKSIEINLLGANMFSYSINVEETYPGKLLLKVKDKISELMPSISQDSIIVSANQYEVRINSEGRRELLDHSGEWINKEESIIKDISSKEYISFNPKENKITVKSKNLPELSTLLQEIRNNSNSSDIELEEKVMLTECEINVISNIDTQIVEERIEEAKNLTSDSINYIKDEFKLIESISDALCDLKQQNELEDSHFISFEDISETDEGFSIRFINKETGESIFVETEKTIFSEYANHITEEISKIKGTIFDTVNGKLVKKVNLDTTHEVNTLNAAFFIQSLIEYNSSKESLSNLSVAMKVQVYAQLFSTGLNTITDAAKVVELVSTALDETIDLLPTLSEGLPIIATIIDGVSLGAAIKELSETSDPLLRQEIEAKIGIMAVNLTTATTAIITSSLGVASGFSILLVPLAGISAGIPSLVNNELVLRDKATKVVDYFKHVSLVETEGVFTLLDDKIMMPQDDLVISEIDFNNNSIVLGKCEIWRMEGGSGHTVTDDIDHFFSAPSITYREPHLSIYDVLEVQKEELDLSKDLMVLPNAPNRVFAWETGWTPGLRSLENDGTKLLDRIRDNYEGEFYWRYFAFIADALITTLKPRYEDTNIRINLDSNTRSFIVPIITTEYIREKLSYSFYGSGGTYALSLSQYNMGINIELSESDVWIIDVDNVVRDVTIESDKIKKGDLIEGILSTLSIEENKIILNSHEINFSGEVNGSNGFVSLTFSILEGINAIIEVDLLSKSYKLLISGELKILMLNSNHIQQKIDYIGFNSELQKNIPYSFVDSEGKENGFINGSTKEGLFVSELPDVVLISKVYMDDSKPSFGYYSNNLKDVKVITKDNVNILTGYYLKDDIKISLSLTLQDEKTIKLNSVHLDESGVAEILKFMNRKGNTNTSDSLMSFLESMNIKSIFVNFLQSNIKFILDANFIISGTTSIGQFEFICDENDNIQPYFIKFNTLETNYTLYVGNRQNMIVEPNYDLDDSGDISSTVINFSQKYLYGIDSCVNKVVISPNIYTDEINITPVYETNNTYPEVIVLDANYINEKINVNINDLSIRYVWSNDGNDFILMSTSEENKVSQVKIRFVNVFKDKTLANKLSFNFSDKQDVPVSEIILSFTPSYYEDGLIGYDLGLVSLYNEKFYINNFGMMVSGLIYINDSLYYFKPPVNNLITGFVTVGDDKYYFNPINGGAASIGETIIDDKNYYFNQSGVLQTGVFSTEDGFKYFAPANTLDENLEGEAIDFTGKLIIDENIYYFDDNYRGAVEWKELDGEMHYFSPETGKAFKGLNQIGDYKYYFNSDGVMQKGFVSINDNKHYFDDSGVMKVGYTEIDGKHFYFAENGEMQIGVFNTEDGFKYFAHHNEDLGNEEGEEISYSGILNFNNKIYYFDDSFTAVVGWKDLEDGSKYYFDEDTAEAYIGLSLINDGQYYFNDDGIMQVGFVTINDKVFYFSDSGIIESGVQNIDDNYFYIDDNGIVQIGVFDTSDGYKYFAPANTVNDNIYGQAVEYSGLVRVGEDVYYFGETYTIETGWIYDMENESDKYYFNPETKKACKGINLIDDIKYYFDEKGIMRTGLISFENNNYYFNENGEMQFGYINIEDKMFYFGEDGVMQIGVFNTPDGFKYFAHQNTLDENFEGESINYTGWLDLDEKRYYFTDEYIAATGSVIIDGEEYYFDPDTAQLVISE

SEQ ID NO: 337 - protein, 2365 aa, synthetic construct; identical to SEQ ID NO: 330
  REGION 1..2365: note = Synthetic amino acid sequence

SEQ ID NO: 338 - protein, 2365 aa, synthetic construct; identical to SEQ ID NO: 331
  REGION 1..2365: note = Synthetic amino acid sequence

SEQ ID NO: 339 - protein, 2365 aa, synthetic construct; identical to SEQ ID NO: 330
  REGION 1..2365: note = Synthetic amino acid sequence

SEQ ID NO: 340 - protein, 2366 aa, synthetic construct
  REGION 1..2366: note = Synthetic amino acid sequence
SLVNRKQLEKMANVRFRVQEDEYVAILDALEEYHNMSENTVVEKYLKLKDINSLTDTYIDTYKKSGRNKALKKFKEYLVTEILELKNSNLTPVEKNLHFIAIGGQINDTAINYINQWKDVNSDYNVNVFYDSNAFLINTLKKTIIESASNDTLESFRENLNDPEFNHTAFFRKRMQIIYDKQQNFINYYKAQKEENPDLIIDDIVKTYLSNEYSKDIDELNAYIEESLNKVTENSGNDVRNFEEFKTGEVFNLYEQELVERWNLAGASDILRVAILKNIGGVYLDVAMLPGIHPDLFKDINKPDSVKTAVDWEEMQLEAIMKYKEYIPEYTSKHFDTLDEEVQSSFESVLASKSDKSEIFLPLGDIEVSPLEVKIAFAKGSIINQALISAKDSYCSDLLIKQIQNRYKILNDTLGPIISQGNDFNTTMNNFGESLGAIANEENISFIAKIGSYLRVGFYPEANTTITLSGPTIYAGAYKDLLTFKEMSIDTSILSSELRNFEFPKVNISQATEQQKNSLAQFNEERAKIQFEEYKKNYFEGALGEDDNLDFSQNTVIDKEYLLEKISSSTKSSERGYVHYIVQLQGDKISYEAACNLFAKNPYDSILFQKNIEDSEVAYYYNPTDSEIQEIDKYRIPDRISDRPKIKLTLIGHGKAEFNTDIFAGLDVDSLSSEIETIIDLAKADISPKSIEINLLGANMFSYSVNVEETYPGKLLLRVKDKVSELMPSISQDSIIVSANQYEVRINSEGRRELLDHSGEWINKEESIIKDISSKEYISFNPKENKIIVKSKNLPELSTLLQEIRNNSNSSDIELEEKVMLAECEINVISNIETQVVEERIEEAKSLTSDSINYIKNEFKLIESISDALYDLKQQNELEESHFISFEDISETDEGFSIRFIDKETGESIFVETEKAIFSEYANHITEEISKIKGTIFDTVNGKLVKKVNLDATHEVNTLNAAFFIQSLIEYNSSKESLSNLSVAMKVQVYAQLFSTGLNTITDAAKVVELVSTALDETIDLLPTLSEGLPVIATIIDGVSLGAAIKELSETSDPLLRQEIEAKIGIMAVNLTAATTAIITSSLGIASGFSILLVPLAGISAGIPSLVNNELILRDKATKVVDYFSHISLAESEGAFTSLDDKIMMPQDDLVISEIDFNNNSITLGKCEIWRMEGGSGHTVTDDIDHFFSSPSITYREPHLSIYDVLEVKKEELDLSKDLMVLPNAPNRVFGWETGWTPGLRGLENDGTKLLDRIRDQYEGQFYWRFFAFIADALITTLKPRYEDTNVRISLDSNTRSFIVPVITTEYIREKLSYSFYGSGGTYALSLSQYNMNINIELNENDTWVIDVDNVVRSVTIESDKIKKGDLIENILSKLSIEDNKIILDNHEINFSGTLNGGNGFVSLTFSILEGINAVIEVDLLSKSYKVLISGELKTLMANSNSVQQKIDYIGLNSELQKNIPYSFMDDKGKENGFINCSTKEGLFVSELSDVVLIIKVYMDNSKPPFGYYSNDLKDVKAITKDDVIILTGYYLKDDIKISLSFTIQDKNTIKLNGVYLDENGVAEILKFMNKKGSTNTSDSLMSFLESMNIKSIFIKSLKSNAKLILDTNFIISGTTSIGQFEFICDKDNNIQPYFIKFNTLETKYTLYVGNRQNMIVEPNYDLDDSGDISSTVINFSQKYLYGIDSCVNKVIISPNIYTDEINITPIYEANNTYPEVIVLDTNYISEKINININDLSIRYVWSNDGSDFILMSTDEENKVSQVKIRFTNVFKGNTISDKISFNFSDKQDVSINKIISTFTPSYYVEGLLNYHLGLISLYNEKFYINNFGMMVSGLVYINDSLYYFKPPIKNLITGFTTIGDDKYYFNPDNGGAASVGETIIDGKNYYFSPNGVLQTGVFSTEDGFKYFAPADTLDENLEGEAIDFTGKLIIDENVYYFGDNYRAAIEWQTLDDEVYYFSTDTGRAFKGLNQIGDDKFYFNSDGIMQKGFVNINDKTFYFDDSGVMKSGYTEIDGKHFYFAENGEMQIGVFNTADGFKYFAHHDEDLGNEEGEALSYSGILNFNNKIYYFDDSFTAVVGWKDSEDGSKYYFDEDTAEAYIGISTINDGKYYFNDSGIMQIGFVTINNEVFYFSDSGIVESGMQNIDDNYFYIDENGLVQIGVFDTSDGYKYFAPANTVNDNIYGQAVEYSGLVRVGEDVYYFGETYTIETGWIYDMENESDKYYFDPETKKAYKGINVIDDIKYYFDENGIMRTGLITFEDNHYYFNEDGIMQYGYINIEDKMFYFNEDGVMQIGVFNTADGFKYFAHQNTLDENFEGESINYTGWLDLDEKRYYFTDEYIAAIGSVIIDGEEYYFDPDTAELVISE

SEQ ID NO: 341 - protein, 2366 aa, synthetic construct; identical to SEQ ID NO: 340
  REGION 1..2366: note = Synthetic amino acid sequence

SEQ ID NO: 342 - protein, 2366 aa, synthetic construct
  REGION 1..2366: note = Synthetic amino acid sequence
SLVNRKQLEKMANVRFRVQEDEYVAILDALEEYHNMSENTVVEKYLKLKDINSLTDTYIDTYKKSGRNKALKKFKEYLVTEILELKNSNLTPVEKNLHFIAIGGQINDTAINYINQWKDVNSDYNVNVFYDSNAFLINTLKKTIIESASNDTLESFRENLNDPEFNHTAFFRKRMQIIYDKQQNFINYYKAQKEENPDLIIDDIVKTYLSNEYSKDIDELNAYIEESLNKVTENSGNDVRNFEEFKTGEVFNLYEQELVERWNLAGASDILRVAILKNIGGVYLDVAMLPGIHPDLFKDINKPDSVKTAVDWEEMQLEAIMKYKEYIPEYTSKHFDTLDEEVQSSFESVLASKSDKSEIFLPLGDIEVSPLEVKIAFAKGSIINQALISAKDSYCSDLLIKQIQNRYKILNDTLGPIISQGNDFNTTMNNFGESLGAIANEENISFIAKIGSYLRVGFYPEANTTITLSGPTIYAGAYKDLLTFKEMSIDTSILSSELRNFEFPKVNISQATEQQKNSLAQFNEERAKIQFEEYKKNYFEGALGEDDNLDFSQNTVIDKEYLLEKISSSTKSSERGYVHYIVQLQGDKISYEAACNLFAKNPYDSILFQKNIEDSEVAYYYNPTDSEIQEIDKYRIPDRISDRPKIKLTLIGHGKAEFNTDIFAGLDVDSLSSEIETIIDLAKADISPKSIEINLLGANMFSYSVNVEETYPGKLLLRVKDKVSELMPSISQDSIIVSANQYEVRINSEGRRELLDHSGEWINKEESIIKDISSKEYISFNPKENKIIVKSKNLPELSTLLQEIRNNSNSSDIELEEKVMLAECEINVISNIETQVVEERIEEAKSLTSDSINYIKNEFKLIESISDALYDLKQQNELEESHFISFEDISETDEGFSIRFIDKETGESIFVETEKAIFSEYANHITEEISKIKGTIFDTVNGKLVKKVNLDATHEVNTLNAAFFIQSLIEYNSSKESLSNLSVAMKVQVYAQLFSTGLNTITDAAKVVELVSTALDETIDLLPTLSEGLPVIATIIDGVSLGAAIKELSETSDPLLRQEIEAKIGIMAVNLTAATTAIITSSLGIASGFSILLVPLAGISAGIPSLVNNELILRDKATKVVDYFSHISLAESEGAFTSLDDKIMMPQDDLVISEIDFNNNSITLGKCEIWRMEGGSGHTVTDDIDHFFSSPSITYREPHLSIYDVLEVKKEELDLSKDLMVLPNAPNRVFGWETGWTPGLRGLENDGTKLLDRIRDQYEGQFYWRFFAFIADALITTLKPRYEDTNVRISLDSNTRSFIVPVITTEYIREKLSYSFYGSGGTYALSLSQYNMNINIELNENDTWVIDVDNVVRSVTIESDKIKKGDLIENILSKLSIEDNKIILDNHEINFSGTLNGGNGFVSLTFSILEGINAVIEVDLLSKSYKVLISGELKTLMANSNSVQQKIDYIGLNSELQKNIPYSFMDDKGKENGFINCSTKDGLFVSELSDVVLIIKVYMDNSKPPFGYYSNDLKDVKAITKDDVIILTGYYLKDDIKISLSFTIQDKNTIKLNGVYLDENGVAEILKFMNKKGSTNTSDSLMSFLESMNIKSIFIKSLKSNAKLILDTNFIISGTTSIGQFEFICDKDNNIQPYFIKFNTLETKYTLYVGNRQNMIVEPNYDLDDSGDISSTVINFSQKYLYGIDSCVNKVIISPNIYTDEINITPIYEANNTYPEVIVLDTNYISEKINININDLSIRYVWSNDGSDFILMSTDEENKVSQVKIRFTNVFKGNTISDKISFNFSDKQDVSINKIISTFTPSYYVEGLLNYHLGLISLYNEKFYINNFGMMVSGLVYINDSLYYFKPPIKNLITGFTTIGDDKYYFNPDNGGAASVGETIIDGKNYYFSPNGVLQTGVFSTEDGFKYFAPADTLDENLEGEAIDFTGKLIIDENVYYFGDNYRAAIEWQTLDDEVYYFSTDTGRAFKGLNQIGDDKFYFNSDGIMQKGFVNINDKTFYFDDSGVMKSGYTEIDGKHFYFAENGEMQIGVFNTADGFKYFAHHDEDLGNEEGEALSYSGILNFNNKIYYFDDSFTAVVGWKDSEDGSKYYFDEDTAEAYIGISTINDGKYYFNDSGIMQIGFVTINNEVFYFSDSGIVESGMQNIDDNYFYIDENGLVQIGVFDTSDGYKYFAPANTVNDNIYGQAVEYSGLVRVGEDVYYFGETYTIETGWIYDMENESDKYYFDPETKKAYKGINVIDDIKYYFDENGIMRTGLITFEDNHYYFNEDGIMQYGYINIEDKMFYFNEDGVMQIGVFNTADGFKYFAHQNTLDENFEGESINYTGWLDLDEKRYYFTDEYIAAIGSVIIDGEEYYFDPDTAELVISE

SEQ ID NO: 343 - protein, 2365 aa, synthetic construct; identical to SEQ ID NO: 336
  REGION 1..2365: note = Synthetic amino acid sequence

SEQ ID NO: 344 - protein, 2365 aa, synthetic construct; identical to SEQ ID NO: 331
  REGION 1..2365: note = Synthetic amino acid sequence

SEQ ID NO: 345 - protein, 2365 aa, synthetic construct
  REGION 1..2365: note = Synthetic amino acid sequence
SLVNRKQLEKMANVRFRTQEDEYVAILDALEEYHNMSENTVVEKYLKLKDINSLTDIYIDTYKKSGRNKALKKFKEYLVTEVLELKNNNLTPVEKNLHFVAIGGQINDTAINYINQWKDVNSDYNVNVFYDSNAFLINTLKKTVVESAINDTLESFRENLNDPRFDYNKFFRKRMEIIYDKQKNFINYYKAQREENPELIIDDIVKTYLSNEYSKEIDELNTYIEESLNKITQNSGNDVRNFEEFKNGESFNLYEQELVERWNLAAASDILRISALKEIGGMYLDVAMLPGIQPDLFESIEKPSSVTVDFWEMTKLEAIMKYKEYIPEYTSEHFDMLDEEVQSSFESVLASKSDKSEIFSSLGDMEASPLEVKIAFNSKGIINQGLISVKDSYCSNLIVKQIENRYKILNNSLNPAISEDNDFNTTTNTFIDSIMAEANADNGRFMMELGKYLRVGFFPDVKTTINLSGPEAYAAAYQDLLMFKEGSMNIHLIEADLRNFEISKTNISQSTEQQMASLASFDDARAKAQFEEYKRNYFEGSLGEDDNLDFSQNIVVDKEYLLEKISSLARSSERGYIHYIVQLQGDKISYEAACNLFAKTPYDSVLFQKNIEDSEIAYYYNPGDGEIQEIDKYKIPSIISDRPKIKLTFIGHGKDEFNTDIFAGFDVDSLSTEIEAAIDLAKEDISPKSIEINLLGANMFSYSINVEETYPGKLLLKVKDKISELMPSISQDSIIVSANQYEVRINSEGRRELLDHSGEWINKEESIIKDISSKEYISFNPKENKITVKSKNLPELSTLLQEIRNNSNSSDIELEEKVMLTECEINVISNIDTQIVEERIEEAKNLTSDSINYIKDEFKLIESISDALCDLKQQNELEDSHFISFEDISETDEGFSIRFINKETGESIFVETEKTIFSEYANHITEEISKIKGTIFDTVNGKLVKKVNLDTTHEVNTLNAAFFIQSLIEYNSSKESLSNLSVAMKVQVYAQLFSTGLNTITDAAKVVELVSTALDETIDLLPTLSEGLPIIATIIDGVSLGAAIKELSETSDPLLRQEIEAKIGIMAVNLTTATTAIITSSLGIASGFSILLVPLAGISAGIPSLVNNELVLRDKATKVVDYFKHVSLVETEGVFTLLDDKIMMPQDDLVISEIDFNNNSIVLGKCEIWRMEGGSGHTVTDDIDHFFSAPSITYREPHLSIYDVLEVQKEELDLSKDLMVLPNAPNRVFAWETGWTPGLRSLENDGTKLLDRIRDNYEGEFYWRYFAFIADALITTLKPRYEDTNIRINLDSNTRSFIVPIITTEYIREKLSYSFYGSGGTYALSLSQYNMGINIELSESDVWIIDVDNVVRDVTIESDKIKKGDLIEGILSTLSIEENKIILNSHEINFSGEVNGSNGFVSLTFSILEGINAIIEVDLLSKSYKLLISGELKILMLNSNHIQQKIDYIGFNSELQKNIPYSFVDSEGKENGFINGSTKEGLFVSELPDVVLISKVYMDDSKPSFGYYSNNLKDVKVITKDNVNILTGYYLKDDIKISLSLTLQDEKTIKLNSVHLDESGVAEILKFMNRKGNTNTSDSLMSFLESMNIKSIFVNFLQSNIKFILDANFIISGTTSIGQFEFICDENDNIQPYFIKFNTLETNYTLYVGNRQNMIVEPNYDLDDSGDISSTVINFSQKYLYGIDSCVNKVVISPNIYTDEINITPVYETNNTYPEVIVLDANYINEKINVNINDLSIRYVWSNDGNDFILMSTSEENKVSQVKIRFVNVFKDKTLANKLSFNFSDKQDVPVSEIILSFTPSYYEDGLIGYDLGLVSLYNEKFYINNFGMMLSGLIYINDSLYYFKPPVNNLITGFVTVGDDKYYFNPINGGAASIGETIIDDKNYYFNQSGVLQTGVFSTEDGFKYFAPANTLDENLEGEAIDFTGKLIIDENIYYFDDNYRGAVEWKELDGEMHYFSPETGKAFKGLNQIGDDKYYFNSDGVMQKGFVSINDNKHYFDDSGVMKVGYTEIDGKHFYFAENGEMQIGVFNTEDGFKYFAHHNEDLGNEEGEEISYSGILNFNNKIYYFDDSFTAVVGWKDLEDGSKYYFDEDTAEAYIGLSLINDGQYYFNDDGIMQVGFVTINDKVFYFSDSGIIESGVQNIDDNYFYIDDNGIVQIGVFDTSDGYKYFAPANTVNDNIYGQAVEYSGLVRVGEDVYYFGETYTIETGWIYDMENESDKYYFNPETKKACKGINLIDDIKYYFDEKGIMRTGLISFENNNYYFNENGEMQFGYINIEDKMFYFGEDGVMQIGVFNTPDGFKYFAHQNTLDENFEGESINYTGWLDLDEKRYYFTDEYIAATGSVIIDGEEYYFDPDTAQLVISE

SEQ ID NO: 346 - protein, 2365 aa, synthetic construct; identical to SEQ ID NO: 336
  REGION 1..2365: note = Synthetic amino acid sequence

SEQ ID NO: 347 - protein, 2365 aa, synthetic construct; identical to SEQ ID NO: 220
  REGION 1..2365: note = Synthetic amino acid sequence

SEQ ID NO: 348 - protein, 2365 aa, synthetic construct; identical to SEQ ID NO: 336
  REGION 1..2365: note = Synthetic amino acid sequence

SEQ ID NO: 349 - protein, 2365 aa, synthetic construct; identical to SEQ ID NO: 336
  REGION 1..2365: note = Synthetic amino acid sequence

SEQ ID NO: 350 - protein, 2365 aa, synthetic construct
  REGION 1..2365: note = Synthetic amino acid sequence
SLVNRKQLEKMANVRFRTQEDEYVAILDALEEYHNMSENTVVEKYLKLKDINSLTDIYIDTYKKSGRNKALKKFKEYLVTEVLELKNNNLTPVEKNLHFVAIGGQINDTAINYINQWKDVNSDYNVNVFYDSNAFLINTLKKTVVESAINDTLESFRENLNDPRFDYNKFFRKRMEIIYDKQKNFINYYKAQREENPELIIDDIVKTYLSNEYSKEIDELNTYIEESLNKITQNSGNDVRNFEEFKNGESFNLYEQELVERWNLAAASDILRISALKEIGGMYLDVAMLPGIQPGLFESIEKPSSVTVDFWEMTKLEAIMKYKEYIPEYTSEHFDMLDEEVQSSFESVLASKSDKSEIFSSLGDMEASPLEVKIAFNSKGIINQGLISVKDSYCSNLIVKQIENRYKILNNSLNPAISEDNDFNTTTNTFIDSIMAEANADNGRFMMELGKYLRVGFFPDVKTTINLSGPEAYAAAYQDLLMFKEGSMNIHLIEADLRNFEISKTNISQSTEQQMASLASFDDARAKAQFEEYKRNYFEGSLGEDDNLDFSQNIVVDKEYLLEKISSLARSSERGYIHYIVQLQGDKISYEAACNLFAKTPYDSVLFQKNIEDSEIAYYYNPGDGEIQEIDKYKIPSIISDRPKIKLTFIGHGKDEFNTDIFAGFDVDSLSTEIEAAIDLAKEDISPKSIEINLLGANMFSYSINVEETYPGKLLLKVKDKISELMPSISQDSIIVSANQYEVRINSEGRRELLDHSGEWINKEESIIKDISSKEYISFNPKENKITVKSKNLPELSTLLQEIRNNSNSSDIELEEKVMLTECEINVISNIDTQIVEERIEEAKNLTSDSINYIKDEFKLIESISDALCDLKQQNELEDSHFISFEDISETDEGFSIRFINKETGESIFVETEKTIFSEYANHITEEISKIKGTIFDTVNGKLVKKVNLDTTHEVNTLNAAFFIQSLIEYNSSKESLSNLSVAMKVQVYAQLFSTGLNTITDAAKVVELVSTALDETIDLLPTLSEGLPIIATIIDGVSLGAAIKELSETSDPLLRQEIEAKIGIMAVNLTTATTAIITSSLGVASGFSILLVPLAGISAGIPSLVNNELVLRDKATKVVDYFKHVSLVETEGVFTLLDDKIMMPQDDLVISEIDFNNNSIVLGKCEIWRMEGGSGHTVTDDIDHFFSAPSITYREPHLSIYDVLEVQKEELDLSKDLMVLPNAPNRVFAWETGWTPGLRSLENDGTKLLDRIRDNYEGEFYWRYFAFIADALITTLKPRYEDTNIRINLDSNTRSFIVPIITTEYIREKLSYSFYGSGGTYALSLSQYNMGINIELSESDVWIIDVDNVVRDVTIESDKIKKGDLIEGILSTLSIEENKIILNSHEINFSGEVNGSNGFVSLTFSILEGINAIIEVDLLSKSYKLLISGELKILMLNSNHIQQKIDYIGFNSELQKNIPYSFVDSEGKENGFINGSTKEGLFVSELPDVVLISKVYMDDSKPSFGYYSNNLKDVKVITKDNVNILTGYYLKDDIKISLSLTLQDEKTIKLNSVHLDESGVAEILKFMNRKGNTNTSDSLMSFLESMNIKSIFVNFLQSNIKFILDANFIISGTTSIGQFEFICDENDNIQPYFIKFNTLETNYTLYVGNRQNMIVEPNYDLDDSGDISSTVINFSQKYLYGIDSCVNKVVISPNIYTDEINITPVYETNNTYPEVIVLDANYINEKINVNINDLSIRYVWSNDGNDFILMSTSEENKVSQVKIRFVNVFKDKTLANKLSFNFSDKQDVPVSEIILSFTPSYYEDGLIGYDLGLVSLYNEKFYINNFGMMVSGLIYINDSLYYFKPPVNNLITGFVTVGDDKYYFNPINGGAASIGETIIDDKNYYFNQSGVLQTGVFSTEDGFKYFAPANTLDENLEGEAIDFTGKLIIDENIYYFDDNYRGAVEWKELDGEMHYFSPETGKAFKGLNQIGDYKYYFNSDGVMQKGFVSINDNKHYFDDSGVMKVGYTEIDGKHFYFAENGEMQIGVFNTEDGFKYFAHHNEDLGNEEGEEISYSGILNFNNKIYYFDDSFTAVVGWKDLEDGSKYYFDEDTAEAYIGLSLINDGQYYFNDDGIMQVGFVTINDKVFYFSDSGIIESGVQNIDDNYFYIDDNGIVQIGVFDTSDGYKYFAPANTVNDNIYGQAVEYSGLVRVGEDVYYFGETYTIETGWIYDMENESDKYYFNPETKKACKGINLIDDIKYYFDEKGIMRTGLISFENNNYYFNENGEMQFGYINIEDKMFYFGEDGVMQIGVFNTPDGFKYFAHQNTLDENFEGESINYTGWLDLDEKRYYFTDEYIAATGSVIIDGEEYYFDPDTAQLVISE

SEQ ID NO: 351 - protein, 2365 aa, synthetic construct; identical to SEQ ID NO: 350
  REGION 1..2365: note = Synthetic amino acid sequence

SEQ ID NO: 352 - protein, 2365 aa, synthetic construct; identical to SEQ ID NO: 336
  REGION 1..2365: note = Synthetic amino acid sequence

SEQ ID NO: 353 - protein, 2365 aa, synthetic construct
  REGION 1..2365: note = Synthetic amino acid sequence
SLVNRKQLEKMANVRFRTQEDEYVAILDALEEYHNMSENTVVEKYLKLKDINSLTDIYIDTYKKSGRNKALKKFKEYLVTEVLELKNNNLTPVEKNLHFVAIGGQINDTAINYINQWKDVNSDYNVNVFYDSNAFLINTLKKTVVESAINDTLESFRENLNDPRFDYNKFFRKRMEIIYDKQKNFINYYKAQREENPELIIDDIVKTYLSNEYSKEIDELNTYIEESLNKITQNSGNDVRNFEEFKNGESFNLYEQELVERWNLAAASDILRISALKEIGGMYLDVAMLPGIQPDLFESIEKPSSVTVDFWEMTKLEAIMKYKEYIPEYTSEHFDMLDEEVQSSFESVLASKSDKSEIFSSLGDMEASPLEVKIAFNSKGIINQGLISVKDSYCSNLIVKQIENRYKILNNSLNPAISEDNDFNTTTNTFIDSIMAEANADNGRFMMELGKYLRVGFFPDVKTTINLSGPEAYAAAYQDLLMFKEGSMNIHLIEADLRNFEISKTNISQSTEQQMASLASFDDARAKAQFEEYKRNYFEGSLGEDDNLDFSQNIVVDKEYLLEKISSLARSSERGYIHYIVQLQGDKISYEAACNLFAKTPYDSVLFQKNIEDSEIAYYYNPGDGEIQEIDKYKIPSIISDRPKIKLTFIGHGKDEFNTDIFAGFDVDSLSTEIEAAIDLAKEDISPKSIEINLLGANMFSYSINVEETYPGKLLLKVKDKISELMPSISQDSIIVSANQYEVRINSEGRRELLDHSGEWINKEESIIKDISSKEYISFNPKENKITVKSKNLPELSTLLQEIRNNSNSSDIELEEKVMLTECEINVISNIDTQIVEERIEEAKNLTSDSINYIKDEFKLIESISDALCDLKQQNELEDSHFISFEDISETDEGFSIRFINKETGESIFVETEKTIFSEYANHITEEISKIKGTIFDTVNGKLVKKVNLDTTHEVNTLNAAFFIQSLIEYNSSKESLSNLSVAMKVQVYAQLFSTGLNTITDAAKVVELVSTALDETIDLLPTLSEGLPIIATIIDGVSLGAAIKELSETSDPLLRQEIEAKIGIMAVNLTTATTAIITSSLGVASGFSILLVPLAGISAGIPSLVNNELVLRDKATKVVDYFKHVSLVETEGVFTLLDDKIMMPQDDLVISEIDFNNNSIVLGKCEIWRMEGGSGHTVTDDIDHFFSAPSITYREPHLSIYDVLEVQKEELDLSKDLMVLPNAPNRVFAWETGWTPGLRSLENDGTKLLDRIRDNYEGEFYWRYFAFIADALITTLKPRYEDTNIRINLDSNTRSFIVPIITTEYIREKLSYSFYGSGGTYALSLSQYNMGINIELSESDVWIIDVDNVVRDVTIESDKIKKGDLIEGILSTLSIEENKIILNSHEINFSGEVNGSNGFVSLTFSILEGINAIIEVDLLSKSYKLLISGELKILMLNSNHIQQKIDYIGFNSELQKNIPYSFVDSEGKENGFINGSTKEGLFVSELPDVVLISKVYMDDSKPSFGYYSNNLKDVKVITKDNVNILTGYYLKDDIKISLSLTLQDEKTIKLNSVHLDESGVAEILKFMNRKGSTNTSDSLMSFLESMNIKSIFVNFLQSNIKFILDANFIISGTTSIGQFEFICDENDNIQPYFIKFNTLETNYTLYVGNRQNMIVEPNYDLDDSGDISSTVINFSQKYLYGIDSCVNKVVISPNIYTDEINITPVYETNNTYPEVIVLDANYINEKINVNINDLSIRYVWSNDGNDFILMSTSEENKVSQVKIRFVNVFKDKTLANKLSFNFSDKQDVPVSEIILSFTPSYYEDGLIGYDLGLVSLYNEKFYINNFGMMVSGLIYINDSLYYFKPPVNNLITGFVTVGDDKYYFNPINGGAASIGETIIDDKNYYFNQSGVLQTGVFSTEDGFKYFAPANTLDENLEGEAIDFTGKLIIDENIYYFDDNYRGAVEWKELDGEMHYFSPETGKAFKGLNQIGDDKYYFNSDGVMQKGFVSINDNKHYFDDSGVMKVGYTEIDGKHFYFAENGEMQIGVFNTEDGFKYFAHHNEDLGNEEGEEISYSGILNFNNKIYYFDDSFTAVVGWKDLEDGSKYYFDEDTAEAYIGLSLINDGQYYFNDDGIMQVGFVTINDKVFYFSDSGIIESGVQNIDDNYFYIDDNGIVQIGVFDTSDGYKYFAPANTVNDNIYGQAVEYSGLVRVGEDVYYFGETYTIETGWIYDMENESDKYYFNPETKKACKGINLIDDIKYYFDEKGIMRTGLISFENNNYYFNENGEMQFGYINIEDKMFYFGEDGVMQIGVFNTPDGFKYFAHQNTLDENFEGESINYTGWLDLDEKRYYFTDEYIAATGSVIIDGEEYYFDPDTAQLVISE

SEQ ID NO: 354 - protein, 2366 aa, synthetic construct; identical to SEQ ID NO: 335
  REGION 1..2366: note = Synthetic amino acid sequence

SEQ ID NO: 355 - protein, 2365 aa, synthetic construct
  REGION 1..2365: note = Synthetic amino acid sequence
SLVNRKQLEKMANVRFRTQEDEYVAILDALEEYHNMSENTVVEKYLKLKDINSLTDIYIDTYKKSGRNKALKKFKEYLVTEVLELKNNNLTPVEKNLHFVAIGGQINDTAINYINQWKDVNSDYNVNVFYDSNAFLINTLKKTVVESAINDTLESFRENLNDPRFDYNKFFRKRMEIIYDKQKNFINYYKAQREENPELIIDDIVKTYLSNEYSKEIDELNTYIEESLNKITQNSGNDVRNFEEFKNGESFNLYEQELVERWNLAAASDILRISALKEIGGMYLDVAMLPGIQPDLFESIEKPSSVTVDFWEMTKLEAIMKYKEYIPEYTSEHFDMLDEEVQSSFESVLASKSDKSEIFSSLGDMEASPLEVKIAFNSKGIINQGLISVKDSYCSNLIVKQIENRYKILNNSLNPAISEDNDFNTTTNTFIDSIMAEANADNGRFMMELGKYLRVGFFPDVKTTINLSGPEAYAAAYQDLLMFKEGSMNIHLIEADLRNFEISKTNISQSTEQQMASLASFDDSRAKAQFEEYKRNYFEGSLGEDDNLDFSQNIVVDKEYLLEKISSLARSSERGYIHYIVQLQGDKISYEAACNLFAKTPYDSVLFQKNIEDSEIAYYYNPGDGEIQEIDKYKIPSIISDRPKIKLTFIGHGKDEFNTDIFAGFDVDSLSTEIEAAIDLAKEDISPKSIEINLLGANMFSYSINVEETYPGKLLLKVKDKISELMPSISQDSIIVSANQYEVRINSEGRRELLDHSGEWINKEESIIKDISSKEYISFNPKENKITVKSKNLPELSTLLQEIRNNSNSSDIELEEKVMLTECEINVISNIDTQIVEERIEEAKNLTSDSINYIKDEFKLIESISDALCDLKQQNELEDSHFISFEDISETDEGFSIRFINKETGESIFVETEKTIFSEYANHITEEISKIKGTIFDTVNGKLVKKVNLDTTHEVNTLNAAFFIQSLIEYNSSKESLSNLSVAMKVQVYAQLFSTGLNTITDAAKVVELVSTALDETIDLLPTLSEGLPIIATIIDGVSLGAAIKELSETSDPLLRQEIEAKIGIMAVNLTTATTAIITSSLGVASGFSILLVPLAGISAGIPSLVNNELVLRDKATKVVDYFKHVSLVETEGVFTLLDDKIMMPQDDLVISEIDFNNNSIVLGKCEIWRMEGGSGHTVTDDIDHFFSAPSITYREPHLSIYDVLEVQKEELDLSKDLMVLPNAPNRVFAWETGWTPGLRSLENDGTKLLDRIRDNYEGEFYWRYFAFIADALITTLKPRYEDTNIRINLDSNTRSFIVPIITTEYIREKLSYSFYGSGGTYALSLSQYNMGINIELSESDVWIIDVDNVVRDVTIESDKIKKGDLIEGILSTLSIEENKIILNSHEINFSGEVNGSNGFVSLTFSILEGINAIIEVDLLSKSYKLLISGELKILMLNSNHIQQKIDYIGFNSELQKNIPYSFVDSEGKENGFINGSTKEGLFVSELPDVVLISKVYMDDSKPSFGYYSNNLKDVKVITKDNVNILTGYYLKDDIKISLSLTLQDEKTIKLNSVHLDESGVAEILKFMNRKGSTNTSDSLMSFLESMNIKSIFVNFLQSNIKFILDANFIISGTTSIGQFEFICDENDNIQPYFIKFNTLETNYTLYVGNRQNMIVEPNYDLDDSGDISSTVINFSQKYLYGIDSCVNKVVISPNIYTDEINITPVYETNNTYPEVIVLDANYINEKINVNINDLSIRYVWSNDGNDFILMSTSEENKVSQVKIRFVNVFKDKTLANKLSFNFSDKQDVPVSEIILSFTPSYYEDGLIGYDLGLVSLYNEKFYINNFGMMVSGLIYINDSLYYFKPPVNNLITGFVTVGDDKYYFNPINGGAASIGETIIDDKNYYFNQSGVLQTGVFSTEDGFKYFAPANTLDENLEGEAIDFTGKLIIDENIYYFDDNYRGAVEWKELDGEMHYFSPETGKAFKGLNQIGDDKYYFNSDGVMQKGFVSINDNKHYFDDSGVMKVGYTEIDGKHFYFAENGEMQIGVFNTEDGFKYFAHHNEDLGNEEGEEISYSGILNFNNKIYYFDDSFTAVVGWKDLEDGSKYYFDEDTAEAYIGLSLINDGQYYFNDDGIMQVGFVTINDKVFYFSDSGIIESGVQNIDDNYFYIDDNGIVQIGVFDTSDGYKYFAPANTVNDNIYGQAVEYSGLVRVGEDVYYFGETYTIETGWIYDMENESDKYYFNPETKKACKGINLIDDIKYYFDEKGIMRTGLISFENNNYYFNENGEMQFGYINIEDKMFYFGEDGVMQIGVFNTPDGFKYFAHQNTLDENFEGESINYTGWLDLDEKRYYFTDEYIAATGSVIIDGEEYYFDPDTAQLVISE

SEQ ID NO: 356 - protein, 2365 aa, synthetic construct; identical to SEQ ID NO: 355
  REGION 1..2365: note = Synthetic amino acid sequence

SEQ ID NO: 357 - protein, 2365 aa, synthetic construct; identical to SEQ ID NO: 355
  REGION 1..2365: note = Synthetic amino acid sequence

SEQ ID NO: 358 - protein, 2365 aa, synthetic construct
  REGION 1..2365: note = Synthetic amino acid sequence
SLVNRKQLEKMANVRFRTQEDEYVAILDALEEYHNMSENTVVEKYLKLKDINSLTDIYIDTYKKSGRNKALKKFKEYLVTEVLELKNNNLTPVEKNLHFVAIGGQINDTAINYINQWKDVNSDYNVNVFYDSNAFLINTLKKTVVESAINDTLESFRENLNDPRFDYNKFFRKRMEIIYDKQKNFINYYKAQREENPELIIDDIVKTYLSNEYSKEIDELNTYIEESLNKITQNSGNDVRNFEEFKNGESFNLYEQELVERWNLAAASDILRISALKEIGGMYLDVAMLPGIQPDLFESIEKPSSVTVDFWEMTKLEAIMKYKEYIPEYTSEHFDMLDEEVQSSFESVLASKSDKSEIFSSLGDMEASPLEVKIAFNSKGIINQGLISVKDSYCSNLIVKQIENRYKILNNSLNPAISEDNDFNTTTNTFIDSIMAEANADNGRFMMELGKYLRVGFFPDVKTTINLSGPEAYAAAYQDLLMFKEGSMNIHLIEADLRNFEIFKTNISQSTEQQMASLASFDDSRAKAQFEEYKRNYFEGSLGEDDNLDFSQNIVVDKEYLLEKISSLARSSERGYIHYIVQLQGDKISYEAACNLFAKTPYDSVLFQKNIEDSEIAYYYNPGDGEIQEIDKYKIPSIISDRPKIKLTFIGHGKDEFNTDIFAGFDVDSLSTEIEAAIDLAKEDISPKSIEINLLGANMFSYSINVEETYPGKLLLKVKDKISELMPSISQDSIIVSANQYEVRINSEGRRELLDHSGEWINKEESIIKDISSKEYISFNPKENKITVKSKNLPELSTLLQEIRNNSNSSDIELEEKVMLTECEINVISNIDTQIVEERIEEAKNLTSDSINYIKDEFKLIESISDALCDLKQQNELEDSHFISFEDISETDEGFSIRFINKETGESIFVETEKTIFSEYANHITEEISKIKGTIFDTVNGKLVKKVNLDTTHEVNTLNAAFFIQSLIEYNSSKESLSNLSVAMKVQVYAQLFSTGLNTITDAAKVVELVSTALDETIDLLPTLSEGLPIIATIIDGVSLGAAIKELSETSDPLLRQEIEAKIGIMAVNLTTATTAIITSSLGVASGFSILLVPLAGISAGIPSLVNNELVLRDKATKVVDYFKHVSLVETEGVFTLLDDKIMMPQDDLVISEIDFNNNSIVLGKCEIWRMEGGSGHTVTDDIDHFFSAPSITYREPHLSIYDVLEVQKEELDLSKDLMVLPNAPNRVFAWETGWTPGLRSLENDGTKLLDRIRDNYEGEFYWRYFAFIADALITTLKPRYEDTNIRINLDSNTRSFIVPIITTEYIREKLSYSFYGSGGTYALSLSQYNMGINIELSESDVWIIDVDNVVRDVTIESDKIKKGDLIEGILSTLSIEENKIILNSHEINFSGEVNGSNGFVSLTFSILEGINAIIEVDLLSKSYKLLISGELKILMLNSNHIQQKIDYIGFNSELQKNIPYSFVDSEGKENGFINGSTKEGLFVSELPDVVLISKVYMDDSKPSFGYYSNNLKDVKVITKDNVNILTGYYLKDDIKISLSLTLQDEKTIKLNSVHLDESGVAEILKFMNRKGSTNTSDSLMSFLESMNIKSIFVNFLQSNIKFILDANFIISGTTSIGQFEFICDENDNIQPYFIKFNTLETNYTLYVGNRQNMIVEPNYDLDDSGDISSTVINFSQKYLYGIDSCVNKVVISPNIYTDEINITPVYETNNTYPEVIVLDANYINEKINVNINDLSIRYVWSNDGNDFILMSTSEENKVSQVKIRFVNVFKDKTLANKLSFNFSDKQDVPVSEIILSFTPSYYEDGLIGYDLGLVSLYNEKFYINNFGMMVSGLIYINDSLYYFKPPVNNLITGFVTVGDDKYYFNPINGGAASIGETIIDDKNYYFNQSGVLQTGVFSTEDGFKYFAPANTLDENLEGEAIDFTGKLIIDENIYYFDDNYRGAVEWKELDGEMHYFSPETGKAFKGLNQIGDDKYYFNSDGVMQKGFVSINDNKHYFDDSGVMKVGYTEIDGKHFYFAENGEMQIGVFNTEDGFKYFAHHNEDLGNEEGEEISYSGILNFNNKIYYFDDSFTAVVGWKDLEDGSKYYFDEDTAEAYIGLSLINDGQYYFNDDGIMQVGFVTINDKVFYFSDSGIIESGVQNIDDNYFYIDDNGIVQIGVFDTSDGYKYFAPANTVNDNIYGQAVEYSGLVRVGEDVYYFGETYTIETGWIYDMENESDKYYFNPETKKACKGINLIDDIKYYFDEKGIMRTGLISFENNNYYFNENGEMQFGYINIEDKMFYFGEDGVMQIGVFNTPDGFKYFAHQNTLDENFEGESINYTGWLDLDEKRYYFTDEYIAATGSVIIDGEEYYFDPDTAQLVISE

SEQ ID NO: 359 - protein, 2365 aa, synthetic construct; identical to SEQ ID NO: 358
  REGION 1..2365: note = Synthetic amino acid sequence

SEQ ID NO: 360 - protein, 2365 aa, synthetic construct; identical to SEQ ID NO: 331
  REGION 1..2365: note = Synthetic amino acid sequence

SEQ ID NO: 361 - protein, 2365 aa, synthetic construct
  REGION 1..2365: note = Synthetic amino acid sequence
SLVNRKQLEKMANVRFRTQEDEYVAILDALEEYHNMSENTVVEKYLKLKDINSLTDIYIDTYKKSGRNKALKKFKEYLVTEVLELKNNNLTPVEKNLHFVAIGGQINDTAINYINQWKDVNSDYNVNVFYDSNAFLINTLKKTVVESAINDTLESFRENLNDPRFDYNKFFRKRMEIIYDKQKNFINYYKAQREENPELIIDDIVKTYLSNEYSKEIDELNTYIEESLNKITQNSGNDVRNFEEFKNGESFNLYEQELVERWNLAAASDILRISALKEIGGMYLDVAMLPGIQPDLFESIEKPSSVTVDFWEMTKLEAIMKYKEYIPEYTSEHFDMLDEEVQSSFESVLASKSDKSEIFSSLGDMEASPLEVKIAFNSKGIINQGLISVKDSYCSNLIVKQIENRYKILNNSLNPAISEDNDFNTTTNTFIDSIMAEANADNGRFMMELGKYLRVGFFPDVKTTINLSGPEAYAAAYQDLLMFKEGSMNIHLIEADLRNFEISKTNISQSTEQQMASLASFDDARAKAQFEEYKRNYFEGSLGEDDNLDFSQNIVVDKEYLLEKISSLARSSERGYIHYIVQLQGDKISYEAACNLFAKTPYDSVLFQKNIEDSEIAYYYNPGDGEIQEIDKYKIPSIISDRPKIKLTFIGHGKDEFNTDIFAGFDVDSLSTEIEAAIDLAKEDISPKSIEINLLGANMFSYSINVEETYPGKLLLKVKDKISELMPSISQDSIIVSANQYEVRINSEGRRELLDHSGEWINKEESIIKDISSKEYISFNPKENKITVKSKNLPELSTLLQEIRNNSNSSDIELEEKVMLTECEINVISNIDTQIVEERIEEAKNLTSDSINYIKDEFKLIESISDALCDLKQQNELEDSHFISFEDISETEEGFSIRFINKETGESIFVETEKTIFSEYANHITEEISKIKGTIFDTVNGKLVKKVNLDTTHEVNTLNAAFFIQSLIEYNSSKESLSNLSVAMKVQVYAQLFSTGLNTITDAAKVVELVSTALDETIDLLPTLSEGLPIIATIIDGVSLGAAIKELSETSDPLLRQEIEAKIGIMAVNLTTATTAIITSSLGIASGFSILLVPLAGISAGIPSLVNNELVLRDKATKVVDYFKHVSLVETEGVFTLLDDKIMMPQDDLVISEIDFNNNSIVLGKCEIWRMEGGSGHTVTDDIDHFFSAPSITYREPHLSIYDVLEVQKEELDLSKDLMVLPNAPNRVFAWETGWTPGLRSLENDGTKLLDRIRDNYEGEFYWRYFAFIADALITTLKPRYEDTNIRINLDSNTRSFIVPIITTEYIREKLSYSFYGSGGTYALSLSQYNMGINIELSESDVWIIDVDNVVRDVTIESDKIKKGDLIEGILSTLSIEENKIILNSHEINFSGEVNGSNGFVSLTFSILEGINAIIEVDLLSKSYKLLISGELKILMLNSNHIQQKIDYIGFNSELQKNIPYSFVDSEGKENGFINGSTKEGLFVSELPDVVLISKVYMDDSKPSFGYYSNNLKDVKVITKDNVNILTGYYLKDDIKISLSLTLQDEKTIKLNSVHLDESGVAEILKFMNRKGNTNTSDSLMSFLESMNIKSIFVNFLQSNIKFILDANFIISGTTSIGQFEFICDENDNIQPYFIKFNTLETNYTLYVGNRQNMIVEPNYDLDDSGDISSTVINFSQKYLYGIDSCVNKVVISPNIYTDEINITPVYETNNTYPEVIVLDANYINEKINVNINDLSIRYVWSNDGNDFILMSTSEENKVSQVKIRFVNVFKDKTLANKLSFNFSDKQDVPVSEIILSFTPSYYEDGLIGYDLGLVSLYNEKFYINNFGMMVSGLIYINDSLYYFKPPVNNLITGFVTVGDDKYYFNPINGGAASIGETIIDDKNYYFNQSGVLQTGVFSTEDGFKYFAPANTLDENLEGEAIDFTGKLIIDENIYYFEDNYRGAVEWKELDGEMHYFSPETGKAFKGLNQIGDDKYYFNSDGVMQKGFVSINDNKHYFDDSGVMKVGYTEIDGKYFYFAENGEMQIGVFNTEDGFKYFAHHNEDLGNEEGEEISYSGILNFNNKIYYFDDSFTAVVGWKDLEDGSKYYFDEDTAEAYIGLSLINDGQYYFNDDGIMQVGFVTINDKVFYFSDSGIIESGVQNIDDNYFYIDDNGIVQIGVFDTSDGYKYFAPANTVNDNIYGQAVEYSGLVRVGEDVYYFGETYTIETGWIYDMENESDKYYFNPETKKACKGINLIDDIKYYFDEKGIMRTGLISFENNNYYFNENGEMQFGYINIEDKMFYFGEDGVMQIGVFNTPDGFKYFAHQNTLDENFEGESINYTGWLDLDEKRYYFTDEYIAATGSVIIDGEEYYFDPDTAQLVISE

SEQ ID NO: 362 - protein, 2365 aa, synthetic construct; identical to SEQ ID NO: 350
  REGION 1..2365: note = Synthetic amino acid sequence

SEQ ID NO: 363 - protein, 2365 aa, synthetic construct
  REGION 1..2365: note = Synthetic amino acid sequence
SLVNRKQLEKMANVRFRTQEDEYVAILDALEEYHNMSENTVVEKYLKLKDINSLTDIYIDTYKKSGRNKALKKFKEYLVTEVLELKNNNLTPVEKNLHFVAIGGQINDTAINYINQWKDVNSDYNVNVFYDSNAFLINTLKKTIVESAINDTLESFRENLNNPRFDYNKFFRKRMEIIYDKQKNFINYYKAQREENPELIIDDIVKIYLSNEYSKEIDELNTYIEESLNKIKQNSGNDVRNFEEFKNGESFKLYEQELVERWNLAAASDILRISALKEIGGMYLDVAMLPGIQPGLFESIEKPSSVTVDFWEMTKLEAIMKYKEYIPGYTSEHFDMLDEEVQSSFESALASKSDKSEIFSSLGDMEASPLEVKIAFNSKGIINQGLISVKDSYCSNLIVKQIENRYKILNNSLNPAISEDNDFNTTTNTFIDSIMAEANADNGRFMMELGKYLRVGFFPDVKTTVNLSGPEAYAAAYQDLLMFKEGSMNIHLIEADLRNFEISKTNISQSTEQQMASLATFDDARAKVQFEEYKRNYFEGSLGEDDNLDFSQNIVVDKEYLLEKISSLARSSERGYIHYIVQLQGDKISYEAACNLFAKTPYDSILFQKNIENSEVAYYYNPGDGEIQEIDKYRIPSIISDRPKIKLTFIGHGKDEFNTDIFAGLDVDSLSTEIETAIDLAKEDISSKSIEINLLGANMFSYSINVEETYPGKLLLKVKDKISELMPSISQDSIIVSANQYEVRINNEGRRELLDHSGEWINKEESIIKDISSKEYISFNPKENKITVKSKNLPELSTLLQEIRNNSNLSDIELEEKVMLAECEINVISNIDTQIVEERIEEAKNLTSDSINYIKNEFKLIESISDSLYDLKQQNELDDSHFISFEDISKTEDGFSIRFINKETGESIFVETEKEIFSEYANHIRGEISNIKDTIFDTVNGKLVKKVNLDAIHEVNTLNAAFFIQSLIGYSSSKESLSNLSVAMKVQVYAQLFSTGLNTITDAAKVVELVSTALDETIDLLPTLSEGLPVIATIIDGVSLGAAIKELSETSDPLLRQEIEAKIGIMAVNLTAATTAIITSSLGVASGFSILLVPLAGISAGIPSLVNNELVLRDKATKVVDYFKHISLVETEGAFTLLDDKIMIPQDDLVISEIDFNNNSIVLGKCEIWRMEGGSGHTVTNDIDHFFSSPTITYIKPHLSIYDVLEVQKEELDLSKDLMVLPNAPNRVFAWETGWTPGLRSLENEGTKLLDRIRDHYKGEFYWRYFAFIADALITTLKPRYEDTNIRINLDSNNRSFIVPIITTEHIREKLSYSFHGSGGTYALSLSQYNMGINIELSESDVWIIDVDNVVRDVTIDSDKIKKGDLIEGILSTLSIEDNKIILNHHEINFSGDVNGSNGFISLTFSILEGINAIIEVDLLSKSYKLLISGELKILMLNSNHIQQKIDYIGFNSELQKNIPYSFVDSEGKENGFINGSTKEGLFVSELPDVVLISKVYMDDSKPSFGYYSNNLKDVKVITKDNVNILTGYYLKDDIKISLSFTLQDEKTIKLNGVHLDESGVAEILKFMNKKGSTNTSDSLMSFLESVNIKSIFVNFLQSKINFILDANFIISGTTSIGQFEFICDENDNIQPYFIKFNTLETTYTLYVGNRQNMIVEPNYDLDDSGDISSTVINFSQKYLYGIDSCVNKVVISPNIYTDEINITPVYETNNNYPEVIVLDANYINEKINVNINDLSIRYVWSNDGNDFILMSTSEENKVSQVKIRFVNVFKDKTLANKLSFNFSDKQDVPVSEIISAFTPSYYEDGLIGYDLGLVSLYNEKFYINNFGMMVSGLIYINDSLYYFKPPVNNLITGFVTVGDDKYYFNPTNGGAASIGETIINDKNYYFNQSGILQTGVFSTEDGLKYFAPANTLDENLEGEAIDFTGKLIIDENIYYFEDNYRGAVEWKELDGEMYYFSPETGKAFKGLNQIGDDKYYFNSDGIMQKGFVSINDKKYYFDDSGVMKVGYIEIDGKYFYFAENGEMQIGVFNTSDGFKYFAHHNEDLGNEEGEAISYSGILNFNNKIYYFDYSFTAVVGWKDLEDGSKYYFDEDTAEAYVGLSLINDGQYYFNDDGIMQVGFVTINNKVFYFSDSGIIESGVQNIDDNYFYIDEKGIVQIGVFDTSDEYKYFAPANTVNDNIYGQAVDYSGLVRVGEDIYYFGETYTIETGWIYDMENESDKYYFNPETKKACKGINLIDDIKYYFDENGIMRTGLISFENNDYYFNENGEMQFGYINIEDKMFYFGEDGVMQIGVFNTQDGFKYFAHQNTLDENFEGESINYTGWLDLDEKRYYFTDEYIAATGSVIIDGEEYYFDPDTAQLVISE

SEQ ID NO: 364 - protein, 2365 aa, synthetic construct; identical to SEQ ID NO: 363
  REGION 1..2365: note = Synthetic amino acid sequence

SEQ ID NO: 365 - protein, 2365 aa, synthetic construct
  REGION 1..2365: note = Synthetic amino acid sequence
SLVNRKQLEKMANVRFRTQEDEYVAILDALEEYHNMSENTVVEKYLKLKDINSLTDIYIDTYKKSGRNKALKKFKEYLVTEVLELKNNNLTPVEKNLHFVAIGGQINDTAINYINQWKDVNSDYNVNVFYDSNAFLINTLKKTIVESAINDTLESFRENLNNPRFDYNKFFRKRMEIIYDKQKNFINYYKAQREENPELIIDDIVKIYLSNEYSKEIDELNTYIEESLNKIKQNSGNDVRNFEEFKNGESFKLYEQELVERWNLAAASDILRISALKEIGGMYLDVAMLPGIQPDLFESIEKPSSVTVDFWEMTKLEAIMKYKEYIPGYTSEHFDMLDEEVQSSFESALASKSDKSEIFSSLGDMEASPLEVKIAFNSKGIINQGLISVKDSYCSNLIVKQIENRYKILNNSLNPAISEDNDFNTTTNTFIDSIMAEANADNGRFMMELGKYLRVGFFPDVKTTVNLSGPEAYAAAYQDLLMFKEGSMNIHLIEADLRNFEISKTNISQSTEQQMASLATFDDARAKVQFEEYKRNYFEGSLGEDDNLDFSQNIVVDKEYLLEKISSLARSSERGYIHYIVQLQGDKISYEAACNLFAKTPYDSILFQKNIENSEVAYYYNPGDGEIQEIDKYRIPSIISDRPKIKLTFIGHGKDEFNTDIFAGLDVDSLSTEIETAIDLAKEDISSKSIEINLLGANMFSYSINVEETYPGKLLLKVKDKISELMPSISQDSIIVSANQYEVRINNEGRRELLDHSGEWINKEESIIKDISSKEYISFNPKENKITVKSKNLPELSTLLQEIRNNSNLSDIELEEKVMLAECEINVISNIDTQIVEERIEEAKNLTSDSINYIKNEFKLIESISDSLYDLKQQNELDDSHFISFEDISKTEDGFSIRFINKETGESIFVETEKEIFSEYANHIRREISNIKDTIFDTVNGKLVKKVNLDAIHEVNTLNAAFFIQSLIGYSSSKESLSNLSVAMKVQVYAQLFSTGLNTITDAAKVVELVSTALDETIDLLPTLSEGLPVIATIIDGVSLGAAIKELSETSDPLLRQEIEAKIGIMAVNLTAATTAIITSSLGIASGFSILLVPLAGISAGIPSLVNNELVLRDKATKVVDYFKHISLVETEGAFTLLDDKIMIPQDDLVISEIDFNNNSIVLGKCEIWRMEGGSGHTVTNDIDHFFSSPTITYIKPHLSIYDVLEVQKEELDLSKDLMVLPNAPNRVFAWETGWTPGLRSLENEGTKLLDRIRDHYKGEFYWRYFAFIADALITTLKPRYEDTNIRINLDSNNRSFIVPIITTEHIREKLSYSFHGSGGTYALSLSQYNMGINIELSESDVWIIDVDNVVRDVTIDSDKIKKGDLIEGILSTLSIEDNKIILNHHEINFSGDVNGSNGFISLTFSILEGINAIIEVDLLSKSYKLLISGELKILMLNSNHIQQKIDYIGFNSELQKNIPYSFVDSEGKENGFINGSTKEGLFVSELPDVVLISKVYMDDSKPSFGYYSNNLKDVKVITKDNVNILTGYYLKDDIKISLSFTLQDEKTIKLNGVHLDESGVAEILKFMNKKGSTNTSDSLMSFLESVNIKSIFVNFLQSKINFILDANFIISGTTSIGQFEFICDENDNIQPYFIKFNTLETTYTLYVGNRQNMIVEPNYDLDDSGDISSTVINFSQKYLYGIDSCVNKVVISPNIYTDEINITPVYETNNNYPEVIVLDANYINEKINVNINDLSIRYVWSNDGNDFILMSTSEENKVSQVKIRFVNVFKDKTLANKLSFNFSDKQDVPVSEIISAFTPSYYEDGLIGYDLGLVSLYNEKFYINNFGMMVSGLIYINDSLYYFKPPVNNLITGFVTVGDDKYYFNPTNGGAASIGETIINDKNYYFNQSGILQTGVFSTEDGLKYFAPANTLDENLEGEAIDFTGKLIIDENIYYFEDNYRGAVEWKELDGEMYYFSPETGKAFKGLNQIGDDKYYFNSDGIMQKGFVSINDKKYYFDDSGVMKVGYIEIDGKYFYFAENGEMQIGVFNTSDGFKYFAHHNEDLGNEEGEAISYSGILNFNNKIYYFDYSFTAVVGWKDLEDGSKYYFDEDTAEAYVGLSLINDGQYYFNDDGIMQVGFVTINNKVFYFSDSGIIESGVQNIDDNYFYIDEKGIVQIGVFDTSDEYKYFAPANTVNDNIYGQAVDYSGLVRVGEDIYYFGETYTIETGWIYDMENESDKYYFNPETKKACKGINLIDDIKYYFDENGIMRTGLISFENNDYYFNENGEMQFGYINIEDKMFYFGEDGVMQIGVFNTQDGFKYFAHQNTLDENFEGESINYTGWLDLDEKRYYFTDEYIAATGSVIIDGEEYYFDPDTAQLVISE

SEQ ID NO: 366 - protein, 2365 aa, synthetic construct; identical to SEQ ID NO: 363
  REGION 1..2365: note = Synthetic amino acid sequence

SEQ ID NO: 367 - protein, 2365 aa, synthetic construct; identical to SEQ ID NO: 365
  REGION 1..2365: note = Synthetic amino acid sequence

SEQ ID NO: 368 - protein, 2365 aa, synthetic construct; identical to SEQ ID NO: 365
  REGION 1..2365: note = Synthetic amino acid sequence

SEQ ID NO: 369 - protein, 2365 aa, synthetic construct; identical to SEQ ID NO: 330
  REGION 1..2365: note = Synthetic amino acid sequence

SEQ ID NO: 370 - protein, 2365 aa, synthetic construct; identical to SEQ ID NO: 363
  REGION 1..2365: note = Synthetic amino acid sequence

SEQ ID NO: 371 - protein, 2365 aa, synthetic construct; identical to SEQ ID NO: 365
  REGION 1..2365: note = Synthetic amino acid sequence

SEQ ID NO: 372 - protein, 2365 aa, synthetic construct
  REGION 1..2365: note = Synthetic amino acid sequence
SLVNRKQLEKMANVRFRTQEDEYVAILDALEEYHNMSENTVVEKYLKLKDINSLTDIYIDTYKKSGRNKALKKFKEYLVIEVLELKNNNLTPVEKNLHFVAIGGQINDTAINYINQWKDVNSDYNVNVFYDSNAFLINTLKKTIVESAINDTLESFRENLNNPRFDYNKFFRKRMEIIYDKQKNFINYYKAQREENPELIIDDIVKIYLSNEYSKEIDELNTYIEESLNKIKQNSGNDVRNFEEFKNGESFKLYEQELVERWNLAAASDILRISALKEIGGMYLDVAMLPGIQPGLFESIEKPSSVTVDFWEMTKLEAIMKYKEYIPGYTSEHFDMLDEEVQSSFESALASKSDKSEIFSSLGDMEASPLEVKIAFNSKGIINQGLISVKDSYCSNLIVKQIENRYKILNNSLNPAISEDNDFNTTTNTFIDSIMAEANADNGRFMMELGKYLRVGFFPDVKTTVNLSGPEAYAAAYQDLLMFKEGSMNIHLIEADLRNFEISKTNISQSTEQQMASLATFDDARAKVQFEEYKRNYFEGSLGEDDNLDFSQNIVVDKEYLLEKISSLARSSERGYIHYIVQLQGDKISYEAACNLFAKTPYDSILFQKNIENSEVAYYYNPGDGEIQEIDKYRIPSIISDRPKIKLTFIGHGKDEFNTDIFAGLDVDSLSTEIETAIDLAKEDISSKSIEINLLGANMFSYSINVEETYPGKLLLKVKDKISELMPSISQDSIIVSANQYEVRINNEGRRELLDHSGEWINKEESIIKDISSKEYISFNPKENKITVKSKNLPELSTLLQEIRNNSNLSDIELEEKVMLAECEINVISNIDTQIVEERIEEAKNLTSDSINYIKNEFKLIESISDSLYDLKQQNELDDSHFISFEDISKTEDGFSIRFINKETGESIFVETEKEIFSEYANHIRGEISNIKDTIFDTVNGKLVKKVNLDAIHEVNTLNAAFFIQSLIGYSSSKESLSNLSVAMKVQVYAQLFSTGLNTITDAAKVVELVSTALDETIDLLPTLSEGLPVIATIIDGVSLGAAIKELSETSDPLLRQEIEAKIGIMAVNLTAATTAIITSSLGVASGFSILLVPLAGISAGIPSLVNNELVLRDKATKVVDYFKHISLVETEGAFTLLDDKIMIPQDDLVISEIDFNNNSIVLGKCEIWRMEGGSGHTVTNDIDHFFSSPTITYIKPHLSIYDVLEVQKEELDLSKDLMVLPNAPNRVFAWETGWTPGLRSLENEGTKLLDRIRDHYKGEFYWRYFAFIADALITTLKPRYEDTNIRINLDSNNRSFIVPIITTEHIREKLSYSFHGSGGTYALSLSQYNMGINIELSESDVWIIDVDNVVRDVTIDSDKIKKGDLIEGILSTLSIEDNKIILNHHEINFSGDVNGSNGFISLTFSILEGINAIIEVDLLSKSYKLLISGELKILMLNSNHIQQKIDYIGFNSELQKNIPYSFVDSEGKENGFINGSTKEGLFVSELPDVVLISKVYMDDSKPSFGYYSNNLKDVKVITKDNVNILTGYYLKDDIKISLSFTLQDEKTIKLNGVHLDESGVAEILKFMNKKGSTNTSDSLMSFLESVNIKSIFVNFLQSKINFILDANFIISGTTSIGQFEFICDENDNIQPYFIKFNTLETTYTLYVGNRQNMIVEPNYDLDDSGDISSTVINFSQKYLYGIDSCVNKVVISPNIYTDEINITPVYETNNNYPEVIVLDANYINEKINVNINDLSIRYVWSNDGNDFILMSTSEENKVSQVKIRFVNVFKDKTLANKLSFNFSDKQDVPVSEIISAFTPSYYEDGLIGYDLGLVSLYNEKFYINNFGMMVSGLIYINDSLYYFKPPVNNLITGFVTVGDDKYYFNPTNGGAASIGETIINDKNYYFNQSGILQTGVFSTEDGLKYFAPANTLDENLEGEAIDFTGKLIIDENIYYFEDNYRGAVEWKELDGEMYYFSPETGKAFKGLNQIGDDKYYFNSDGIMQKGFVSINDKKYYFDDSGVMKVGYIEIDGKYFYFAENGEMQIGVFNTSDGFKYFAHHNEDLGNEEGEAISYSGILNFNNKIYYFDYSFTAVVGWKDLEDGSKYYFDEDTAEAYVGLSLINDGQYYFNDDGIMQVGFVTINNKVFYFSDSGIIESGVQNIDDNYFYIDEKGIVQIGVFDTSDEYKYFAPANTVNDNIYGQAVDYSGLVRVGEDIYYFGETYTIETGWIYDMENESDKYYFNPETKKACKGINLIDDIKYYFDENGIMRTGLISFENNDYYFNENGEMQFGYINIEDKMFYFGEDGVMQIGVFNTQDGFKYFAHQNTLDENFEGESINYTGWLDLDEKRYYFTDEYIAATGSVIIDGEEYYFDPDTAQLVISE

SEQ ID NO: 373 - protein, 2365 aa, synthetic construct; identical to SEQ ID NO: 221
  REGION 1..2365: note = Synthetic amino acid sequence

SEQ ID NO: 374 - protein, 321 aa, synthetic construct
  REGION 1..321: note = Synthetic amino acid sequence
IASTGYTIINGKHFYFNTDGIMQIGVFKGPDGFEYFAPANTHNNNIEGQAILYQNKFLTLNGKKYYFGSDSKAVTGLRTIDGKKYYFNTNTAVAVTGWQTINGKKYYFNTNTYIASTGYTIISGKHFYFNTDGIMQIGVFKGPDGFEYFAPANTDANNIEGQAIRYQNRFLYLHDNIYYFGNDSKAATGWATIDGNRYYFEPNTAMGANGYKTIDNKNFYFRNGLPQIGVFKGPNGFEYFAPANTDANNIDGQAIRYQNRFLHLLGKIYYFGNNSKAVTGWQTINSKVYYFMPDTAMAAAGGLFEIDGVIYFFGVDGVKAP

SEQ ID NO: 375 - protein, 321 aa, synthetic construct
  REGION 1..321: note = Synthetic amino acid sequence
IASTGYTSINGKHFYFNTDGIMQIGVFKGPNGFEYFAPANTHNNNIEGQAILYQNKFLTLNGKKYYFGSDSKAVTGLRTIDGKKYYFNTNTAVAVTGWQTINGKKYYFNTNTSIASTGYTIISGKHFYFNTDGIMQIGVFKGPDGFEYFAPANTDANNIEGQAIRYQNRFLYLHDNIYYFGNNSKAATGWVTIDGNRYYFEPNTAMGANGYKTIDNKNFYFRNGLPQIGVFKGSNGFEYFAPANTDANNIEGQAIRYQNRFLHLLGKIYYFGNNSKAVTGWQTINGKVYYFMPDTAMAAAGGLFEIDGVIYFFGVDGVKAP

SEQ ID NO: 376 - protein, 321 aa, synthetic construct; identical to SEQ ID NO: 374
  REGION 1..321: note = Synthetic amino acid sequence

SEQ ID NO: 377 - protein, 321 aa, synthetic construct; identical to SEQ ID NO: 375
  REGION 1..321: note = Synthetic amino acid sequence

SEQ ID NO: 378 - protein, 321 aa, synthetic construct; identical to SEQ ID NO: 375
  REGION 1..321: note = Synthetic amino acid sequence

SEQ ID NO: 379 - protein, 321 aa, synthetic construct
  REGION 1..321: note = Synthetic amino acid sequence
IASTGYTSINGKHFYFNTDGIMQIGVFKGPNGFEYFAPANTDANNIEGQAILYQNKFLTLNGKKYYFGSDSKAVTGLRTIDGKKYYFNTNTAVAVTGWQTINGKKYYFNTNTSIASTGYTIISGKHFYFNTDGIMQIGVFKGPDGFEYFAPANTDANNIEGQAIRYQNRFLYLHDNIYYFGNNSKAATGWVTIDGNRYYFEPNTAMGANGYKTIDNKNFYFRNGLPQIGVFKGSNGFEYFAPANTDANNIEGQAIRYQNRFLHLLGKIYYFGNNSKAVTGWQTINGKVYYFMPDTAMAAAGGLFEIDGVIYFFGVDGVKAP

SEQ ID NO: 380 - protein, 321 aa, synthetic construct
  REGION 1..321: note = Synthetic amino acid sequence
IASTGYTIINGKHFYFNTDGIMQIGVFKGPDGFEYFAPANTDANNIEGQAILYQNKFLTLNGKKYYFASDSKAVTGLRTIDGKKYYFNTNTAEAATGWQTIDGKKYYFNTNTSIASTGYTIINDKHFYFNTDGIMQIGVFKGPDGFEYFAPANTDANNIEGQAIRYQNRFLYLHDNIYYFGNNSKAATGWVTIDGRRYYFEPNTAIGANGYKIIDNKNFYFRNGLPQIGVFKGPNGFEYFAPANTDANNIDGQAIRYQNRFLHLLGNIYYFGNNSKAVTGWQTINGNMYYFMPDTAMAAAGGLFEIDGVIYFFGVDGVKAP

SEQ ID NO: 381 - protein, 321 aa, synthetic construct; identical to SEQ ID NO: 379
  REGION 1..321: note = Synthetic amino acid sequence

SEQ ID NO: 382 - protein, 321 aa, synthetic construct; identical to SEQ ID NO: 380
  REGION 1..321: note = Synthetic amino acid sequence

SEQ ID NO: 383 - protein, 321 aa, synthetic construct; identical to SEQ ID NO: 374
  REGION 1..321: note = Synthetic amino acid sequence

SEQ ID NO: 384 - protein, 321 aa, synthetic construct; identical to SEQ ID NO: 375
  REGION 1..321: note = Synthetic amino acid sequence

SEQ ID NO: 385 - protein, 321 aa, synthetic construct; identical to SEQ ID NO: 375
  REGION 1..321: note = Synthetic amino acid sequence

SEQ ID NO: 386 - protein, 321 aa, synthetic construct; identical to SEQ ID NO: 380
  REGION 1..321: note = Synthetic amino acid sequence

SEQ ID NO: 387 - protein, 321 aa, synthetic construct; identical to SEQ ID NO: 375
  REGION 1..321: note = Synthetic amino acid sequence

SEQ ID NO: 388 - protein, 321 aa, synthetic construct; identical to SEQ ID NO: 380
  REGION 1..321: note = Synthetic amino acid sequence

SEQ ID NO: 389 - protein, 321 aa, synthetic construct
  REGION 1..321: note = Synthetic amino acid sequence
IASTGYTIINGKHFYFNTDGIMQIGVFKGPDGFEYFAPANTHNNNIEGQAILYQNKFLTLNGKKYYFGSDSKAVTGLRTIDGKKYYFNTNTAVAVTGWQTINGKKYYFNTNTYIASTGYTIISGKHFYFNTDGIMQIGVFKGPDGFEYFAPANTDANNIEGQAIRYQNRFLYLHDNIYYFGNDSKAATGWATIDGNRYYFEPNTAMGANGYKTIDNKNFYFRNGLPQIGVFKGPNGFEYFAPANTDANNIDGQAIRYQNRFLHLLGNIYYFGNNSKAVTGWQTINGKVYYFMPDTAMAAAGGLFEIDGVIYFFGVDGVKAP

SEQ ID NO: 390 - protein, 321 aa, synthetic construct; identical to SEQ ID NO: 389
  REGION 1..321: note = Synthetic amino acid sequence

SEQ ID NO: 391 - protein, 321 aa, synthetic construct; identical to SEQ ID NO: 389
  REGION 1..321: note = Synthetic amino acid sequence

SEQ ID NO: 392 - protein, 321 aa, synthetic construct; identical to SEQ ID NO: 375
  REGION 1..321: note = Synthetic amino acid sequence

SEQ ID NO: 393 - protein, 321 aa, synthetic construct; identical to SEQ ID NO: 379
  REGION 1..321: note = Synthetic amino acid sequence

SEQ ID NO: 394 - protein, 321 aa, synthetic construct; identical to SEQ ID NO: 379
  REGION 1..321: note = Synthetic amino acid sequence

SEQ ID NO: 395 - protein, 321 aa, synthetic construct; identical to SEQ ID NO: 375
  REGION 1..321: note = Synthetic amino acid sequence

SEQ ID NO: 396 - protein, 321 aa, synthetic construct; identical to SEQ ID NO: 374
  REGION 1..321: note = Synthetic amino acid sequence

SEQ ID NO: 397 - protein, 321 aa, synthetic construct; identical to SEQ ID NO: 375
  REGION 1..321: note = Synthetic amino acid sequence

SEQ ID NO: 398 - protein, 321 aa, synthetic construct; identical to SEQ ID NO: 375
  REGION 1..321: note = Synthetic amino acid sequence

SEQ ID NO: 399 - protein, 321 aa, synthetic construct; identical to SEQ ID NO: 375
  REGION 1..321: note = Synthetic amino acid sequence

SEQ ID NO: 400 - protein, 321 aa, synthetic construct; identical to SEQ ID NO: 375
  REGION 1..321: note = Synthetic amino acid sequence

SEQ ID NO: 401 - protein, 321 aa, synthetic construct; identical to SEQ ID NO: 375
  REGION 1..321: note = Synthetic amino acid sequence

SEQ ID NO: 402 - protein, 321 aa, synthetic construct; identical to SEQ ID NO: 379
  REGION 1..321: note = Synthetic amino acid sequence

SEQ ID NO: 403 - protein, 321 aa, synthetic construct; identical to SEQ ID NO: 375
  REGION 1..321: note = Synthetic amino acid sequence

SEQ ID NO: 404 - protein, 321 aa, synthetic construct; identical to SEQ ID NO: 375
  REGION 1..321: note = Synthetic amino acid sequence

SEQ ID NO: 405 - protein, 321 aa, synthetic construct; identical to SEQ ID NO: 375
  REGION 1..321: note = Synthetic amino acid sequence

SEQ ID NO: 406 - protein, 321 aa, synthetic construct; identical to SEQ ID NO: 375
  REGION 1..321: note = Synthetic amino acid sequence

SEQ ID NO: 407 - protein, 321 aa, synthetic construct; identical to SEQ ID NO: 379
  REGION 1..321: note = Synthetic amino acid sequence

SEQ ID NO: 408 - protein, 321 aa, synthetic construct; identical to SEQ ID NO: 375
  REGION 1..321: note = Synthetic amino acid sequence

SEQ ID NO: 409 - protein, 321 aa, synthetic construct; identical to SEQ ID NO: 375
  REGION 1..321: note = Synthetic amino acid sequence

SEQ ID NO: 410 - protein, 321 aa, synthetic construct; identical to SEQ ID NO: 375
  REGION 1..321: note = Synthetic amino acid sequence

SEQ ID NO: 411 - protein, 321 aa, synthetic construct
  REGION 1..321: note = Synthetic amino acid sequence
IASTGYTSINGKHFYFNTDGIMQIGVFKGPNGFEYFAPANTHNNNIEGQAILYQNKFLTLNGKKYYFASDSKAVTGLRTIDGKKYYFNTNTAVAATGWQTINGKKYYFNTNTSIASTGYTIINGKHFYFNTDGIMQIGVFKGPDGFEYFAPANTDANNIEGQAIRYQNRFLYLHDNIYYFGNNSKAATGWVTIDGRRYYFEPNTAIGANGYKIIDNKNFYFRNGLPQIGVFKGPNGFEYFAPANTDANNIDGQAIRYQNRFLHLLGNIYYFGNNSKAVTGWQTINGNMYYFMPDTAMAAAGGLFEIDGVIYFFGVDGVKAP

SEQ ID NO: 412 - protein, 321 aa, synthetic construct; identical to SEQ ID NO: 375
  REGION 1..321: note = Synthetic amino acid sequence

SEQ ID NO: 413 - protein, 321 aa, synthetic construct
  REGION 1..321: note = Synthetic amino acid sequence
IASTGYTSINGKHFYFNTDGIMQIGVFKGPNGFEYFAPANTHNNNIEGQAILYQNKFLTLNGKKYYFASDSKAVTGLRTIDGKKYYFNTNTAEAATGWQTINGKKYYFNTNTSIASTGYTIINGKHFYFNTDGIMQIGVFKGPDGFEYFAPANTDANNIEGQAIRYQNRFLYLHDNIYYFGNNSKAATGWVTIDGRRYYFEPNTAIGANGYKIIDNKNFYFRNGLPQIGVFKGPNGFEYFAPANTDANNIDGQAIRYQNRFLHLLGNIYYFGNNSKAVTGWQTINGNMYYFMPDTAMAAAGGLFEIDGVIYFFGVDGVKAP

SEQ ID NO: 414 - protein, 321 aa, synthetic construct; identical to SEQ ID NO: 375
  REGION 1..321: note = Synthetic amino acid sequence

SEQ ID NO: 415 - protein, 321 aa, synthetic construct
  REGION 1..321: note = Synthetic amino acid sequence
IASTGYTSINGKHFYFNTDGIMQIGVFKGPNGFEYFAPANTHNNNIEGQAILYQNKFLTLNGKKYYFASDSKAVTGLRTIDGKKYYFNTNTAVAVTGWQTINGKKYYFNTNTSIASTGYTIISGKHFYFNTDGIMQIGVFKGPDGFEYFAPANTDANNIEGQAIRYQNRFLYLHDNIYYFGNNSKAATGWVTIDGRRYYFEPNTAIGANGYKIIDNKNFYFRNGLPQIGVFKGPNGFEYFAPANTDANNIEGQAIRYQNRFLHLLGNIYYFGNNSKAVTGWQTINGNMYYFMPDTAMAAAGGLFEIDGVIYFFGVDGVKAP

SEQ ID NO: 416 - protein, 321 aa, synthetic construct
  REGION 1..321: note = Synthetic amino acid sequence
IASTGYTSINGKHFYFNTDGIMQIGVFKGPNGFEYFAPANTHNNNIEGQAILYQNKFLTLNGKKYYFASDSKAVTGLRTIDGKKYYFNTNTAVAVTGWQTINGKKYYFNTNTSIASTGYTIINGKHFYFNTDGIMQIGVFKGPDGFEYFAPANTDANNIEGQAIRYQNRFLYLHDNIYYFGNNSKAATGWVTIDGRRYYFEPNTAIGANGYKIIDNKNFYFRNGLPQIGVFKGPNGFEYFAPANTDANNIDGQAIRYQNRFLHLLGNIYYFGNNSKAVTGWQTINGNMYYFMPDTAMAAAGGLFEIDGVIYFFGVDGVKAP

SEQ ID NO: 417 - protein, 321 aa, synthetic construct; identical to SEQ ID NO: 380
  REGION 1..321: note = Synthetic amino acid sequence

SEQ ID NO: 418 - protein, 321 aa, synthetic construct; identical to SEQ ID NO: 375
  REGION 1..321: note = Synthetic amino acid sequence

SEQ ID NO: 419 - protein, 321 aa, synthetic construct; identical to SEQ ID NO: 416
  REGION 1..321: note = Synthetic amino acid sequence

SEQ ID NO: 420 - protein, 321 aa, synthetic construct; identical to SEQ ID NO: 375
  REGION 1..321: note = Synthetic amino acid sequence

SEQ ID NO: 421 - protein, 321 aa, synthetic construct; identical to SEQ ID NO: 379
  REGION 1..321: note = Synthetic amino acid sequence

SEQ ID NO: 422 - protein, 612 aa, synthetic construct
  REGION 1..612: note = Synthetic amino acid sequence
FILMSTDEENKVSQVKIRFTNVFKGNTISDKISFNFSDKQDVSINKVISTFTPSYYVEGLLNYDLGLISLYNEKFYINNFGMMVSGLVYINDSLYYFKPPIKNLITGFTTIGDDKYYFNPDNGGAASVGETIIDGKNYYFSQNGVLQTGVFSTEDGFKYFAPADTLDENLEGEAIDFTGKLTIDENVYYFGDNYRAAIEWQTLDDEVYYFSTDTGRAFKGLNQIGDDKFYFNSDGIMQKGFVNINDKTFYFDDSGVMKSGYTEIDGKYFYFAENGEMQIGVFNTADGFKYFAHHDEDLGNEEGEALSYSGILNFNNKIYYFDDSFTAVVGWKDLEDGSKYYFDEDTAEAYIGISIINDGKYYFNDSGIMQIGFVTINNEVFYFSDSGIVESGMQNIDDNYFYIDENGLVQIGVFDTSDGYKYFAPANTVNDNIYGQAVEYSGLVRVGEDVYYFGETYTIETGWIYDMENESDKYYFDPETKKAYKGINVIDDIKYYFDENGIMRTGLITFEDNHYYFNEDGIMQYGYLNIEDKTFYFSEDGIMQIGVFNTPDGFKYFAHQNTLDENFEGESINYTGWLDLDEKRYYFTDEYIAATGSVIIDGEEYYFDPDTA

SEQ ID NO: 423 - protein, 612 aa, synthetic construct
  REGION 1..612: note = Synthetic amino acid sequence
FILMSTSEENKVSQVKIRFVNVFKDKTLANKLSFNFSDKQDVPVSEIILSFTPSYYEDGLIGYDLGLVSLYNEKFYINNFGMMVSGLIYINDSLYYFKPPVNNLITGFVTVGDDKYYFNPINGGAASIGETIIDDKNYYFNQSGVLQTGVFSTEDGFKYFAPANTLDENLEGEAIDFTGKLIIDENIYYFDDNYRGAVEWKELDGEMHYFSPETGKAFKGLNQIGDYKYYFNSDGVMQKGFVSINDNKHYFDDSGVMKVGYTEIDGKHFYFAENGEMQIGVFNTEDGFKYFAHHNEDLGNEEGEEISYSGILNFNNKIYYFDDSFTAVVGWKDLEDGSKYYFDEDTAEAYIGLSLINDGQYYFNDDGIMQVGFVTINDKVFYFSDSGIIESGVQNIDDNYFYIDDNGIVQIGVFDTSDGYKYFAPANTVNDNIYGQAVEYSGLVRVGEDVYYFGETYTIETGWIYDMENESDKYYFNPETKKACKGINLIDDIKYYFDEKGIMRTGLISFENNNYYFNENGEMQFGYINIEDKMFYFGEDGVMQIGVFNTPDGFKYFAHQNTLDENFEGESINYTGWLDLDEKRYYFTDEYIAATGSVIIDGEEYYFDPDTA

SEQ ID NO: 424 - protein, 612 aa, synthetic construct; identical to SEQ ID NO: 422
  REGION 1..612: note = Synthetic amino acid sequence

SEQ ID NO: 425 - protein, 612 aa, synthetic construct; identical to SEQ ID NO: 423
  REGION 1..612: note = Synthetic amino acid sequence

SEQ ID NO: 426 - protein, 612 aa, synthetic construct
  REGION 1..612: note = Synthetic amino acid sequence
FILMSTSEENKVSQVKIRFVNVFKDKTLANKLSFNFSDKQDVPVSEIILSFTPSYYEDGLIGYDLGLVSLYNEKFYINNFGMMVSGLIYINDSLYYFKPPVNNLITGFVTVGDDKYYFNPINGGAASIGETIIDDKNYYFNQSGVLQTGVFSTEDGFKYFAPANTLDENLEGEAIDFTGKLIIDENIYYFDDNYRGAVEWKELDGEMHYFSPETGKAFKGLNQIGDDKYYFNSDGVMQKGFVSINDNKHYFDDSGVMKVGYTEIDGKHFYFAENGEMQIGVFNTEDGFKYFAHHNEDLGNEEGEEISYSGILNFNNKIYYFDDSFTAVVGWKDLEDGSKYYFDEDTAEAYIGLSLINDGQYYFNDDGIMQVGFVTINDKVFYFSDSGIIESGVQNIDDNYFYIDDNGIVQIGVFDTSDGYKYFAPANTVNDNIYGQAVEYSGLVRVGEDVYYFGETYTIETGWIYDMENESDKYYFNPETKKACKGINLIDDIKYYFDEKGIMRTGLISFENNNYYFNENGEMQFGYINIEDKMFYFGEDGVMQIGVFNTPDGFKYFAHQNTLDENFEGESINYTGWLDLDEKRYYFTDEYIAATGSVIIDGEEYYFDPDTA

SEQ ID NO: 427 - protein, 612 aa, synthetic construct; identical to SEQ ID NO: 426
  REGION 1..612: note = Synthetic amino acid sequence

SEQ ID NO: 428 - protein, 612 aa, synthetic construct
  REGION 1..612: note = Synthetic amino acid sequence
FILMSTSEENKVSQVKIRFVNVFKDKTLANKLSFNFSDKQDVPVSEIISAFTPSYYEDGLIGYDLGLVSLYNEKFYINNFGMMVSGLIYINDSLYYFKPPVNNLITGFVTVGDDKYYFNPTNGGAASIGETIINDKNYYFNQSGILQTGVFSTEDGLKYFAPANTLDENLEGEAIDFTGKLIIDENIYYFEDNYRGAVEWKELDGEMYYFSPETGKAFKGLNQIGDDKYYFNSDGIMQKGFVSINDKKYYFDDSGVMKVGYIEIDGKYFYFAENGEMQIGVFNTSDGFKYFAHHNEDLGNEEGEAISYSGILNFNNKIYYFDYSFTAVVGWKDLEDGSKYYFDEDTAEAYVGLSLINDGQYYFNDDGIMQVGFVTINNKVFYFSDSGIIESGVQNIDDNYFYIDEKGIVQIGVFDTSDEYKYFAPANTVNDNIYGQAVDYSGLVRVGEDIYYFGETYTIETGWIYDMENESDKYYFNPETKKACKGINLIDDIKYYFDENGIMRTGLISFENNDYYFNENGEMQFGYINIEDKMFYFGEDGVMQIGVFNTQDGFKYFAHQNTLDENFEGESINYTGWLDLDEKRYYFTDEYIAATGSVIIDGEEYYFDPDTA

SEQ ID NO: 429 - protein, 612 aa, synthetic construct; identical to SEQ ID NO: 426
  REGION 1..612: note = Synthetic amino acid sequence

SEQ ID NO: 430 - protein, 612 aa, synthetic construct; identical to SEQ ID NO: 428
  REGION 1..612: note = Synthetic amino acid sequence

SEQ ID NO: 431 - protein, 612 aa, synthetic construct; identical to SEQ ID NO: 422
  REGION 1..612: note = Synthetic amino acid sequence

SEQ ID NO: 432 - protein, 612 aa, synthetic construct; identical to SEQ ID NO: 423
  REGION 1..612: note = Synthetic amino acid sequence

SEQ ID NO: 433 - protein, 612 aa, synthetic construct
  REGION 1..612: note = Synthetic amino acid sequence
FILMSTSEENKVSQVKIRFVNVFKDKTLANKLSFNFSDKQDVPVSEIILSFTPSYYEDGLIGYDLGLVSLYNEKFYINNFGMMVSGLIYINDSLYYFKPPVNNLITGFVTVGDDKYYFNPINGGAASIGETIIDDKNYYFNQSGVLQTGVFSTEDGFKYFAPANTLDENLEGEAIDFTGKLIIDENIYYFEDNYRGAVEWKELDGEMHYFSPETGKAFKGLNQIGDDKYYFNSDGVMQKGFVSINDNKHYFDDSGVMKVGYTEIDGKHFYFAENGEMQIGVFNTEDGFKYFAHHNEDLGNEEGEEISYSGILNFNNKIYYFDDSFTAVVGWKDLEDGSKYYFDEDTAEAYIGLSLINDGQYYFNDDGIMQVGFVTINDKVFYFSDSGIIESGVQNIDDNYFYIDDNGIVQIGVFDTSDGYKYFAPANTVNDNIYGQAVEYSGLVRVGEDVYYFGETYTIETGWIYDMENESDKYYFDPETKKACKGINLIDDIKYYFDEKGIMRTGLISFENNNYYFNENGEMQFGYINIEDKMFYFGEDGVMQIGVFNTPDGFKYFAHQNTLDENFEGESINYTGWLDLDEKRYYFTDEYIAATGSVIIDGEEYYFDPDTA

SEQ ID NO: 434 - protein, 612 aa, synthetic construct; identical to SEQ ID NO: 423
  REGION 1..612: note = Synthetic amino acid sequence

SEQ ID NO: 435 - protein, 612 aa, synthetic construct; identical to SEQ ID NO: 428
  REGION 1..612: note = Synthetic amino acid sequence

SEQ ID NO: 436 - protein, 612 aa, synthetic construct; identical to SEQ ID NO: 426
  REGION 1..612: note = Synthetic amino acid sequence

SEQ ID NO: 437 - protein, 612 aa, synthetic construct; identical to SEQ ID NO: 428
  REGION 1..612: note = Synthetic amino acid sequence

SEQ ID NO: 438 - protein, 612 aa, synthetic construct
  REGION 1..612: note = Synthetic amino acid sequence
FILMSTDEENKVSQVKIRFTNVFKGNTISDKISFNFSDKQDVSINKIISTFTPSYYVEGLLNYHLGLISLYNEKFYINNFGMMVSGLVYINDSLYYFKPPIKNLITGFTTIGDDKYYFNPDNGGAASVGETIIDGKNYYFSPNGVLQTGVFSTEDGFKYFAPADTLDENLEGEAIDFTGKLIIDENVYYFGDNYRAAIEWQTLDDEVYYFSTDTGRAFKGLNQIGDDKFYFNSDGIMQKGFVNINDKTFYFDDSGVMKSGYTEIDGKHFYFAENGEMQIGVFNTADGFKYFAHHDEDLGNEEGEALSYSGILNFNNKIYYFDDSFTAVVGWKDSEDGSKYYFDEDTAEAYIGISTINDGKYYFNDSGIMQIGFVTINNEVFYFSDSGIVESGMQNIDDNYFYIDENGLVQIGVFDTSDGYKYFAPANTVNDNIYGQAVEYSGLVRVGEDVYYFGETYTIETGWIYDMENESDKYYFDPETKKAYKGINVIDDIKYYFDENGIMRTGLITFEDNHYYFNEDGIMQYGYINIEDKMFYFNEDGVMQIGVFNTADGFKYFAHQNTLDENFEGESINYTGWLDLDEKRYYFTDEYIAAIGSVIIDGEEYYFDPDTA

SEQ ID NO: 439 - protein, 612 aa, synthetic construct; identical to SEQ ID NO: 438
  REGION 1..612: note = Synthetic amino acid sequence

SEQ ID NO: 440 - protein, 612 aa, synthetic construct; identical to SEQ ID NO: 438
  REGION 1..612: note = Synthetic amino acid sequence

SEQ ID NO: 441 - protein, 612 aa, synthetic construct; identical to SEQ ID NO: 423
  REGION 1..612: note = Synthetic amino acid sequence

SEQ ID NO: 442 - protein, 612 aa, synthetic construct; identical to SEQ ID NO: 426
  REGION 1..612: note = Synthetic amino acid sequence

SEQ ID NO: 443 - protein, 612 aa, synthetic construct
  REGION 1..612: note = Synthetic amino acid sequence
FILMSTSEENKVSQVKIRFVNVFKDKTLANKLSFNFSDKQDVPVSEIILSFTPSYYEDGLIGYDLGLVSLYNEKFYINNFGMMLSGLIYINDSLYYFKPPVNNLITGFVTVGDDKYYFNPINGGAASIGETIIDDKNYYFNQSGVLQTGVFSTEDGFKYFAPANTLDENLEGEAIDFTGKLIIDENIYYFDDNYRGAVEWKELDGEMHYFSPETGKAFKGLNQIGDDKYYFNSDGVMQKGFVSINDNKHYFDDSGVMKVGYTEIDGKHFYFAENGEMQIGVFNTEDGFKYFAHHNEDLGNEEGEEISYSGILNFNNKIYYFDDSFTAVVGWKDLEDGSKYYFDEDTAEAYIGLSLINDGQYYFNDDGIMQVGFVTINDKVFYFSDSGIIESGVQNIDDNYFYIDDNGIVQIGVFDTSDGYKYFAPANTVNDNIYGQAVEYSGLVRVGEDVYYFGETYTIETGWIYDMENESDKYYFNPETKKACKGINLIDDIKYYFDEKGIMRTGLISFENNNYYFNENGEMQFGYINIEDKMFYFGEDGVMQIGVFNTPDGFKYFAHQNTLDENFEGESINYTGWLDLDEKRYYFTDEYIAATGSVIIDGEEYYFDPDTA

SEQ ID NO: 444 - protein, 612 aa, synthetic construct; identical to SEQ ID NO: 423
  REGION 1..612: note = Synthetic amino acid sequence

SEQ ID NO: 445 - protein, 612 aa, synthetic construct; identical to SEQ ID NO: 422
  REGION 1..612: note = Synthetic amino acid sequence

SEQ ID NO: 446 - protein, 612 aa, synthetic construct; identical to SEQ ID NO: 423
  REGION 1..612: note = Synthetic amino acid sequence

SEQ ID NO: 447 - protein, 612 aa, synthetic construct; identical to SEQ ID NO: 423
  REGION 1..612: note = Synthetic amino acid sequence

SEQ ID NO: 448 - protein, 612 aa, synthetic construct; identical to SEQ ID NO: 423
  REGION 1..612: note = Synthetic amino acid sequence

SEQ ID NO: 449 - protein, 612 aa, synthetic construct; identical to SEQ ID NO: 423
  REGION 1..612: note = Synthetic amino acid sequence

SEQ ID NO: 450 - protein, 612 aa, synthetic construct; identical to SEQ ID NO: 423
  REGION 1..612: note = Synthetic amino acid sequence

SEQ ID NO: 451 - protein, 612 aa, synthetic construct; identical to SEQ ID NO: 426
  REGION 1..612: note = Synthetic amino acid sequence

SEQ ID NO: 452 - protein, 612 aa, synthetic construct; identical to SEQ ID NO: 433
  REGION 1..612: note = Synthetic amino acid sequence

SEQ ID NO: 453 - protein, 612 aa, synthetic construct; identical to SEQ ID NO: 426
  REGION 1..612: note = Synthetic amino acid sequence

SEQ ID NO: 454 - protein, 612 aa, synthetic construct; identical to SEQ ID NO: 426
  REGION 1..612: note = Synthetic amino acid sequence

SEQ ID NO: 455 - protein, 612 aa, synthetic construct; identical to SEQ ID NO: 426
  REGION 1..612: note = Synthetic amino acid sequence

SEQ ID NO: 456 - protein, 612 aa, synthetic construct; identical to SEQ ID NO: 426
  REGION 1..612: note = Synthetic amino acid sequence

SEQ ID NO: 457 - protein, 612 aa, synthetic construct; identical to SEQ ID NO: 426
  REGION 1..612: note = Synthetic amino acid sequence

SEQ ID NO: 458 - protein, 612 aa, synthetic construct; identical to SEQ ID NO: 426
  REGION 1..612: note = Synthetic amino acid sequence

SEQ ID NO: 459 - protein, 612 aa, synthetic construct
  REGION 1..612: note = Synthetic amino acid sequence
FILMSTSEENKVSQVKIRFVNVFKDKTLANKLSFNFSDKQDVPVSEIILSFTPSYYEDGLIGYDLGLVSLYNEKFYINNFGMMVSGLIYINDSLYYFKPPVNNLITGFVTVGDDKYYFNPINGGAASIGETIIDDKNYYFNQSGVLQTGVFSTEDGFKYFAPANTLDENLEGEAIDFTGKLIIDENIYYFEDNYRGAVEWKELDGEMHYFSPETGKAFKGLNQIGDDKYYFNSDGVMQKGFVSINDNKHYFDDSGVMKVGYTEIDGKYFYFAENGEMQIGVFNTEDGFKYFAHHNEDLGNEEGEEISYSGILNFNNKIYYFDDSFTAVVGWKDLEDGSKYYFDEDTAEAYIGLSLINDGQYYFNDDGIMQVGFVTINDKVFYFSDSGIIESGVQNIDDNYFYIDDNGIVQIGVFDTSDGYKYFAPANTVNDNIYGQAVEYSGLVRVGEDVYYFGETYTIETGWIYDMENESDKYYFNPETKKACKGINLIDDIKYYFDEKGIMRTGLISFENNNYYFNENGEMQFGYINIEDKMFYFGEDGVMQIGVFNTPDGFKYFAHQNTLDENFEGESINYTGWLDLDEKRYYFTDEYIAATGSVIIDGEEYYFDPDTA

SEQ ID NO: 460 - protein, 612 aa, synthetic construct; identical to SEQ ID NO: 423
  REGION 1..612: note = Synthetic amino acid sequence

SEQ ID NO: 461 - protein, 612 aa, synthetic construct; identical to SEQ ID NO: 428
  REGION 1..612: note = Synthetic amino acid sequence

SEQ ID NO: 462 - protein, 612 aa, synthetic construct; identical to SEQ ID NO: 428
  REGION 1..612: note = Synthetic amino acid sequence

SEQ ID NO: 463 - protein, 612 aa, synthetic construct; identical to SEQ ID NO: 428
  REGION 1..612: note = Synthetic amino acid sequence

SEQ ID NO: 464 - protein, 612 aa, synthetic construct; identical to SEQ ID NO: 428
  REGION 1..612: note = Synthetic amino acid sequence

SEQ ID NO: 465 - protein, 612 aa, synthetic construct; identical to SEQ ID NO: 428
  REGION 1..612: note = Synthetic amino acid sequence

SEQ ID NO: 466 - protein, 612 aa, synthetic construct; identical to SEQ ID NO: 428
  REGION 1..612: note = Synthetic amino acid sequence

SEQ ID NO: 467 - protein, 612 aa, synthetic construct; identical to SEQ ID NO: 428
  REGION 1..612: note = Synthetic amino acid sequence

SEQ ID NO: 468 - protein, 612 aa, synthetic construct; identical to SEQ ID NO: 428
  REGION 1..612: note = Synthetic amino acid sequence

SEQ ID NO: 469 - protein, 612 aa, synthetic construct; identical to SEQ ID NO: 428
  REGION 1..612: note = Synthetic amino acid sequence

SEQ ID NO: 470 - protein, 612 aa, synthetic construct; identical to SEQ ID NO: 428
  REGION 1..612: note = Synthetic amino acid sequence

SEQ ID NO: 471 - protein, 612 aa, synthetic construct; identical to SEQ ID NO: 423
  REGION 1..612: note = Synthetic amino acid sequence

SEQ ID NO: 472 - protein, 540 aa, synthetic construct
  REGION 1..540: note = Synthetic amino acid sequence
SLISKEELIKLAYSIRPRENEYKTILTNLDEYNKLTTNNNENKYLQLKKLNESIDVFMNKYKNSSRNRALSNLKKDILKEVILIKNSNTSPVEKNLHFVWIGGEVSDIALEYIKQWADINAEYNIKLWYDSEAFLVNTLKKAIVESSTTEALQLLEEEIQNPQFDNMKFYKKRMEFIYDRQKRFINYYKSQINKPTVPTIDDIIKSHLVSEYNRDETLLESYRTNSLRKINSNHGIDIRANSLFTEQELLNIYSQELLNRGNLAAASDIVRLLALKNFGGVYLDVDMLPGIHSDLFKTIPRPSSIGLDRWEMIKLEAIMKYKKYINNYTSENFDKLDQQLKDNFKLIIESKSEKSEIFSKLENLNVSDLEIKIAFALGSVINQALISKQGSYLTNLVIEQVKNRYQFLNQHLNPAIESDNNFTDTTKIFHDSLFNSATAENSMFLTKIAPYLQVGFMPEARSTISLSGPGAYASAYYDFINLQENTIEKTLKASDLIEFKFPENNLSQLTEQEINSLWSFDQASAKYQFEKYVRDYTGGS

SEQ ID NO: 473 - protein, 540 aa, synthetic construct
  REGION 1..540: note = Synthetic amino acid sequence
SLISKEELIKLAYSIRPRENEYKTILTNLDEYNKLTTNNNENKYLQLKKLNESIDVFMNKYKTSSRNRALSNLKKDILKEVILIKNSNTSPVEKNLHFVWIGGEVSDIALEYIKQWADINAEYNIKLWYDSEAFLVNTLKKAIVESSTTEALQLLEEEIQNPQFDNMKFYKKRMEFIYDRQKRFINYYKSQINKPTVPTIDDIIKSHLVSEYNRDETVLESYRTNSLRKINSNHGIDIRANSLFTEQELLNIYSQELLNRGNLAAASDIVRLLALKNFGGVYLDVDMLPGIHSDLFKTISRPSSIGLDRWEMIKLEAIMKYKKYINNYTSENFDKLDQQLKDNFKLIIESKSEKSEIFSKLENLNVSDLEIKIAFALGSVINQALISKQGSYLTNLVIEQVKNRYQFLNQHLNPAIESDNNFTDTTKIFHDSLFNSATAENSMFLTKIAPYLQVGFMPEARSTISLSGPGAYASAYYDFINLQENTIEKTLKASDLIEFKFPENNLSQLTEQEINSLWSFDQASAKYQFEKYVRDYTGGS

SEQ ID NO: 474 - protein, 540 aa, synthetic construct; identical to SEQ ID NO: 472
  REGION 1..540: note = Synthetic amino acid sequence

SEQ ID NO: 475 - protein, 540 aa, synthetic construct; identical to SEQ ID NO: 473
  REGION 1..540: note = Synthetic amino acid sequence

SEQ ID NO: 476 - protein, 540 aa, synthetic construct; identical to SEQ ID NO: 473
  REGION 1..540: note = Synthetic amino acid sequence

SEQ ID NO: 477 - protein, 540 aa, synthetic construct; identical to SEQ ID NO: 473
  REGION 1..540: note = Synthetic amino acid sequence

SEQ ID NO: 478 - protein, 540 aa, synthetic construct
  REGION 1..540: note = Synthetic amino acid sequence
SLISKEELIKLAYSIRPRENEYKTILTNLDEYNKLTTNNNENKYLQLKKLNESIDVFMNKYKNSSRNRALSNLKKDILKEVILIKNSNTSPVEKNLHFVWIGGEVSDIALEYIKQWADINAEYNIKLWYDSEAFLVNTLKKAIVESSTTEALQLLEEEIQNPQFDNMKFYKKRMEFIYDRQKRFVNYYKSQINKPTVPTIDDIIKSHLVSEYNRDETLLESYRTNSLRKINSNHGIDIRANSLFTEQELLNIYSQELLNRGNLAAASDIVRLLALKNFGGVYLDVDMLPGIHSDLFKTISRPSSIGLDRWEMIKLEAIMKYKKYINNYTSENFDKLDQQLKDNFKLIIESKSEKSEIFSKLENLNVSDLEIKIAFALGSVINQALISKQGSYLTNLVIEQVKNRYQFLNQHLNPAIESDNNFTDTTKIFHDSLFNSATAENSMFLTKIAPYLQVGFMPEARSTISLSGPGAYASAYYDFINLQENTIEKTLKASDLIEFKFPENNLSQLTEQEINSLWSFDQASAKYQFEKYVRDYTGGS

SEQ ID NO: 479 - protein, 540 aa, synthetic construct; identical to SEQ ID NO: 473
  REGION 1..540: note = Synthetic amino acid sequence

SEQ ID NO: 480 - protein, 540 aa, synthetic construct; identical to SEQ ID NO: 478
  REGION 1..540: note = Synthetic amino acid sequence

SEQ ID NO: 481 - protein, 540 aa, synthetic construct; identical to SEQ ID NO: 472
  REGION 1..540: note = Synthetic amino acid sequence

SEQ ID NO: 482 - protein, 540 aa, synthetic construct; identical to SEQ ID NO: 473
  REGION 1..540: note = Synthetic amino acid sequence

SEQ ID NO: 483 - protein, 540 aa, synthetic construct; identical to SEQ ID NO: 473
  REGION 1..540: note = Synthetic amino acid sequence

SEQ ID NO: 484 - protein, 540 aa, synthetic construct; identical to SEQ ID NO: 478
  REGION 1..540: note = Synthetic amino acid sequence

SEQ ID NO: 485 - protein, 540 aa, synthetic construct; identical to SEQ ID NO: 473
  REGION 1..540: note = Synthetic amino acid sequence

SEQ ID NO: 486 - protein, 540 aa, synthetic construct; identical to SEQ ID NO: 478
  REGION 1..540: note = Synthetic amino acid sequence

SEQ ID NO: 487 - protein, 540 aa, synthetic construct
  REGION 1..540: note = Synthetic amino acid sequence
SLISKEELIKLAYSIRPRENEYKTILTNLDEYNKLTTNNNENKYLQLKKLNESIDVFMNKYKNSSRNRALSNLKKDILKEVILIKNSNTSPVEKNLHFVWIGGEVSDIALEYIKQWADINAEYNIKLWYDSEAFLVNTLKKAIVESSTTEALQLLEEEIQNPQFDNTKFYKKRMEFIYDRQKRFINYYKSQINKPTVPTIDDIIKSHLVSEYNRDETLLESYRTNSLRKINSNHGIDIRANSLFTEQELLNIYSQELLNRGNLAAASDIVRLLALKNFGGVYLDVDMLPGIHSDLFKTISRPSSIGLDRWEMIKLEAIMKYKKYINNYTSENFDKLDQQLKDNFKLIIESKSEKSEIFSKLENLNVSDLEIKIAFALGSVINQALISKQGSYLTNLVIEQVKNRYQFLNQHLNPAIESDNNFTDTTKIFHDSLFNSATAENSMFLTKIAPYLQVGFMPEARSTISLSGPGAYASAYYDFINLQENTIEKTLKASDLIEFKFPENNLSQLTEQEINSLWSFDQASAKYQFEKYVRDYTGGS

SEQ ID NO: 488 - protein, 540 aa, synthetic construct; identical to SEQ ID NO: 487
  REGION 1..540: note = Synthetic amino acid sequence

SEQ ID NO: 489 - protein, 540 aa, synthetic construct; identical to SEQ ID NO: 487
  REGION 1..540: note = Synthetic amino acid sequence

SEQ ID NO: 490 - protein, 540 aa, synthetic construct; identical to SEQ ID NO: 473
  REGION 1..540: note = Synthetic amino acid sequence

SEQ ID NO: 491 - protein, 540 aa, synthetic construct; identical to SEQ ID NO: 473
  REGION 1..540: note = Synthetic amino acid sequence

SEQ ID NO: 492 - protein, 540 aa, synthetic construct; identical to SEQ ID NO: 473
  REGION 1..540: note = Synthetic amino acid sequence

SEQ ID NO: 493 - protein, 540 aa, synthetic construct; identical to SEQ ID NO: 473
  REGION 1..540: note = Synthetic amino acid sequence

SEQ ID NO: 494 - protein, 540 aa, synthetic construct; identical to SEQ ID NO: 472
  REGION 1..540: note = Synthetic amino acid sequence

SEQ ID NO: 495 - protein, 540 aa, synthetic construct; identical to SEQ ID NO: 473
  REGION 1..540: note = Synthetic amino acid sequence

SEQ ID NO: 496 - protein, 540 aa, synthetic construct; identical to SEQ ID NO: 473
  REGION 1..540: note = Synthetic amino acid sequence

SEQ ID NO: 497 - protein, 540 aa, synthetic construct; identical to SEQ ID NO: 473
  REGION 1..540: note = Synthetic amino acid sequence

SEQ ID NO: 498 - protein, 540 aa, synthetic construct
  REGION 1..540: note = Synthetic amino acid sequence
SLISKEELIKLAYSIRPRENEYKTILTNLDEYNKLTTNNNENKYLQLKKLNESIDVFMNKYKTSSRNRALSNLKKDILKEVILIKNSNTSPVEKNLHFVWIGGEVSDIALEYIKQWADINAEYNIKLWYDSEAFLVNTLKKAIVESSTTEALQLLEEEIQNPQFDNMKFYKKRMEFIYDRQKRFINYYKSQINKPTVPTIDDIIKSHLVSEYNRDETVLESYRTNSLRKINSNHGIDIRANSLFTEQELLNIYSQGLLNRGNLAAASDIVRLLALKNFGGVYLDVDMLPGIHSDLFKTISRPSSIGLDRWEMIKLEAIMKYKKYINNYTSENFDKLDQQLKDNFKLIIESKSEKSEIFSKLENLNVSDLEIKIAFALGSVINQALISKQGSYLTNLVIEQVKNRYQFLNQHLNPAIESDNNFTDTTKIFHDSLFNSATAENSMFLTKIAPYLQVGFMPEARSTISLSGPGAYASAYYDFINLQENTIEKTLKASDLIEFKFPENNLSQLTEQEINSLWSFDQASAKYQFEKYVRDYTGGS

SEQ ID NO: 499 - protein, 540 aa, synthetic construct; identical to SEQ ID NO: 473
  REGION 1..540: note = Synthetic amino acid sequence

SEQ ID NO: 500 - protein, 540 aa, synthetic construct; identical to SEQ ID NO: 473
  REGION 1..540: note = Synthetic amino acid sequence

SEQ ID NO: 501 - protein, 540 aa, synthetic construct; identical to SEQ ID NO: 473
  REGION 1..540: note = Synthetic amino acid sequence

SEQ ID NO: 502 - protein, 540 aa, synthetic construct; identical to SEQ ID NO: 473
  REGION 1..540: note = Synthetic amino acid sequence

SEQ ID NO: 503 - protein, 540 aa, synthetic construct; identical to SEQ ID NO: 473
  REGION 1..540: note = Synthetic amino acid sequence

SEQ ID NO: 504 - protein, 540 aa, synthetic construct; identical to SEQ ID NO: 473
  REGION 1..540: note = Synthetic amino acid sequence

SEQ ID NO: 505 - protein, 540 aa, synthetic construct; identical to SEQ ID NO: 473
  REGION 1..540: note = Synthetic amino acid sequence

SEQ ID NO: 506 - protein, 540 aa, synthetic construct; identical to SEQ ID NO: 473
  REGION 1..540: note = Synthetic amino acid sequence

SEQ ID NO: 507 - protein, 540 aa, synthetic construct
  REGION 1..540: note = Synthetic amino acid sequence
SLISKEELIKLAYSIRPRENEYKTILTNLDEYNKLTTNNNENKYLQLKKLNESIDVFMNKYKTSSRNRALSNLKKDILKEVILIKNSNTSPVEKNLHFVWIGGEVSDIALEYIKQWADINAEYNIKLWYDSEAFLVNTLKKAIVESSTTEALQLLEEEIQNPQFDNMKFYKKRMEFIYDRQKRFINYYKSQINKPTVPTIDDIIKSHLVSEYNRDETLLESYRTNSLRKINSNHGIDIRANSLFTEQELLNIYSQELLNRGNLAAASDIVRLLALKNFGGVYLDVDMLPGIHSDLFKTISRPSSIGLDRWEMIKLEAIMKYKKYINNYTSENFDKLDQQLKDNFKLIIESKSEKSEIFSKLENLNVSDLEIKIAFALGSVINQALISKQGSYLTNLVIEQVKNRYQFLNQHLNPAIESDNNFTDTTKIFHDSLFNSATAENSMFLTKIAPYLQVGFMPEARSTISLSGPGAYASAYYDFINLQENTIEKTLKASDLIEFKFPENNLSQLTEQEINSLWSFDQASAKYQFEKYVRDYTGGS

SEQ ID NO: 508 - protein, 540 aa, synthetic construct; identical to SEQ ID NO: 473
  REGION 1..540: note = Synthetic amino acid sequence

SEQ ID NO: 509 - protein, 540 aa, synthetic construct; identical to SEQ ID NO: 478
  REGION 1..540: note = Synthetic amino acid sequence

SEQ ID NO: 510 - protein, 540 aa, synthetic construct; identical to SEQ ID NO: 473
  REGION 1..540: note = Synthetic amino acid sequence

SEQ ID NO: 511 - protein, 540 aa, synthetic construct; identical to SEQ ID NO: 478
  REGION 1..540: note = Synthetic amino acid sequence

SEQ ID NO: 512 - protein, 540 aa, synthetic construct; identical to SEQ ID NO: 473
  REGION 1..540: note = Synthetic amino acid sequence

SEQ ID NO: 513 - protein, 540 aa, synthetic construct; identical to SEQ ID NO: 478
  REGION 1..540: note = Synthetic amino acid sequence

SEQ ID NO: 514 - protein, 540 aa, synthetic construct; identical to SEQ ID NO: 478
  REGION 1..540: note = Synthetic amino acid sequence

SEQ ID NO: 515 - protein, 540 aa, synthetic construct; identical to SEQ ID NO: 478
  REGION 1..540: note = Synthetic amino acid sequence

SEQ ID NO: 516 - protein, 540 aa, synthetic construct; identical to SEQ ID NO: 498
  REGION 1..540: note = Synthetic amino acid sequence

SEQ ID NO: 517 - protein, 540 aa, synthetic construct; identical to SEQ ID NO: 478
  REGION 1..540: note = Synthetic amino acid sequence

SEQ ID NO: 518 - protein, 540 aa, synthetic construct; identical to SEQ ID NO: 473
  REGION 1..540: note = Synthetic amino acid sequence

SEQ ID NO: 519 - protein, 540 aa, synthetic construct; identical to SEQ ID NO: 473
  REGION 1..540: note = Synthetic amino acid sequence

SEQ ID NO: 520 - protein, 540 aa, synthetic construct
  REGION 1..540: note = Synthetic amino acid sequence
SLISKEELIKLAYSIRPRENEYKTILTNLDEYNKLTTNNNENKYLQLKKLNESIDVFMNKYKNSSRNRALSNLKKDILKEVILIKNSNTSPVEKNLHFVWIGGEVSDIALEYIKQWADINAEYNIKLWYDSEAFLVNTLKKAIVESSTTEALQLLEEEIQNPQFDNMKFYKKRMEFIYDRQKRFINYYKSQINKPTVPTIDDIIKSHLVSEYNRDETLLESYRTNSLRKINSNHGIDIRANSLFTEQELLNIYSQELLNRGNLAAASDIVRLLALKNFGGVALAVAMLPGIHSDLFKTIPRPSSIGLDRWEMIKLEAIMKYKKYINNYTSENFDKLDQQLKDNFKLIIESKSEKSEIFSKLENLNVSDLEIKIAFALGSVINQALISKQGSYLTNLVIEQVKNRYQFLNQHLNPAIESDNNFTDTTKIFHDSLFNSATAENSMFLTKIAPYLQVGFMPEARSTISLSGPGAYASAYYDFINLQENTIEKTLKASDLIEFKFPENNLSQLTEQEINSLWSFDQASAKYQFEKYVRDYTGGS

SEQ ID NO: 521 - protein, 540 aa, synthetic construct; identical to SEQ ID NO: 245
  REGION 1..540: note = Synthetic amino acid sequence

SEQ ID NO: 522 - protein, 540 aa, synthetic construct; identical to SEQ ID NO: 520
  REGION 1..540: note = Synthetic amino acid sequence

SEQ ID NO: 523 - protein, 540 aa, synthetic construct; identical to SEQ ID NO: 245
  REGION 1..540: note = Synthetic amino acid sequence

SEQ ID NO: 524 - protein, 540 aa, synthetic construct; identical to SEQ ID NO: 245
  REGION 1..540: note = Synthetic amino acid sequence

SEQ ID NO: 525 - protein, 540 aa, synthetic construct; identical to SEQ ID NO: 245
  REGION 1..540: note = Synthetic amino acid sequence

SEQ ID NO: 526 - protein, 540 aa, synthetic construct
  REGION 1..540: note = Synthetic amino acid sequence
SLISKEELIKLAYSIRPRENEYKTILTNLDEYNKLTTNNNENKYLQLKKLNESIDVFMNKYKNSSRNRALSNLKKDILKEVILIKNSNTSPVEKNLHFVWIGGEVSDIALEYIKQWADINAEYNIKLWYDSEAFLVNTLKKAIVESSTTEALQLLEEEIQNPQFDNMKFYKKRMEFIYDRQKRFVNYYKSQINKPTVPTIDDIIKSHLVSEYNRDETLLESYRTNSLRKINSNHGIDIRANSLFTEQELLNIYSQELLNRGNLAAASDIVRLLALKNFGGVALAVAMLPGIHSDLFKTISRPSSIGLDRWEMIKLEAIMKYKKYINNYTSENFDKLDQQLKDNFKLIIESKSEKSEIFSKLENLNVSDLEIKIAFALGSVINQALISKQGSYLTNLVIEQVKNRYQFLNQHLNPAIESDNNFTDTTKIFHDSLFNSATAENSMFLTKIAPYLQVGFMPEARSTISLSGPGAYASAYYDFINLQENTIEKTLKASDLIEFKFPENNLSQLTEQEINSLWSFDQASAKYQFEKYVRDYTGGS

SEQ ID NO: 527 - protein, 540 aa, synthetic construct; identical to SEQ ID NO: 245
  REGION 1..540: note = Synthetic amino acid sequence

SEQ ID NO: 528 - protein, 540 aa, synthetic construct; identical to SEQ ID NO: 526
  REGION 1..540: note = Synthetic amino acid sequence

SEQ ID NO: 529 - protein, 540 aa, synthetic construct; identical to SEQ ID NO: 520
  REGION 1..540: note = Synthetic amino acid sequence

SEQ ID NO: 530 - protein, 540 aa, synthetic construct; identical to SEQ ID NO: 245
  REGION 1..540: note = Synthetic amino acid sequence

SEQ ID NO: 531 - protein, 540 aa, synthetic construct; identical to SEQ ID NO: 245
  REGION 1..540: note = Synthetic amino acid sequence

SEQ ID NO: 532 - protein, 540 aa, synthetic construct; identical to SEQ ID NO: 526
  REGION 1..540: note = Synthetic amino acid sequence

SEQ ID NO: 533 - protein, 540 aa, synthetic construct; identical to SEQ ID NO: 245
  REGION 1..540: note = Synthetic amino acid sequence

SEQ ID NO: 534 - protein, 540 aa, synthetic construct; identical to SEQ ID NO: 526
  REGION 1..540: note = Synthetic amino acid sequence

SEQ ID NO: 535 - protein, 540 aa, synthetic construct
  REGION 1..540: note = Synthetic amino acid sequence
SLISKEELIKLAYSIRPRENEYKTILTNLDEYNKLTTNNNENKYLQLKKLNESIDVFMNKYKNSSRNRALSNLKKDILKEVILIKNSNTSPVEKNLHFVWIGGEVSDIALEYIKQWADINAEYNIKLWYDSEAFLVNTLKKAIVESSTTEALQLLEEEIQNPQFDNTKFYKKRMEFIYDRQKRFINYYKSQINKPTVPTIDDIIKSHLVSEYNRDETLLESYRTNSLRKINSNHGIDIRANSLFTEQELLNIYSQELLNRGNLAAASDIVRLLALKNFGGVALAVAMLPGIHSDLFKTISRPSSIGLDRWEMIKLEAIMKYKKYINNYTSENFDKLDQQLKDNFKLIIESKSEKSEIFSKLENLNVSDLEIKIAFALGSVINQALISKQGSYLTNLVIEQVKNRYQFLNQHLNPAIESDNNFTDTTKIFHDSLFNSATAENSMFLTKIAPYLQVGFMPEARSTISLSGPGAYASAYYDFINLQENTIEKTLKASDLIEFKFPENNLSQLTEQEINSLWSFDQASAKYQFEKYVRDYTGGS

SEQ ID NO: 536 - protein, 540 aa, synthetic construct; identical to SEQ ID NO: 535
  REGION 1..540: note = Synthetic amino acid sequence

SEQ ID NO: 537 - protein, 540 aa, synthetic construct; identical to SEQ ID NO: 535
  REGION 1..540: note = Synthetic amino acid sequence

SEQ ID NO: 538 - protein, 540 aa, synthetic construct; identical to SEQ ID NO: 245
  REGION 1..540: note = Synthetic amino acid sequence

SEQ ID NO: 539 - protein, 540 aa, synthetic construct; identical to SEQ ID NO: 245
  REGION 1..540: note = Synthetic amino acid sequence

SEQ ID NO: 540 - protein, 540 aa, synthetic construct; identical to SEQ ID NO: 245
  REGION 1..540: note = Synthetic amino acid sequence

SEQ ID NO: 541 - protein, 540 aa, synthetic construct; identical to SEQ ID NO: 245
  REGION 1..540: note = Synthetic amino acid sequence

SEQ ID NO: 542 - protein, 540 aa, synthetic construct; identical to SEQ ID NO: 520
  REGION 1..540: note = Synthetic amino acid sequence

SEQ ID NO: 543 - protein, 540 aa, synthetic construct; identical to SEQ ID NO: 245
  REGION 1..540: note = Synthetic amino acid sequence

SEQ ID NO: 544 - protein, 540 aa, synthetic construct; identical to SEQ ID NO: 245
  REGION 1..540: note = Synthetic amino acid sequence

SEQ ID NO: 545 - protein, 540 aa, synthetic construct; identical to SEQ ID NO: 245
  REGION 1..540: note = Synthetic amino acid sequence

SEQ ID NO: 546 - protein, 540 aa, synthetic construct
  REGION 1..540: note = Synthetic amino acid sequence
SLISKEELIKLAYSIRPRENEYKTILTNLDEYNKLTTNNNENKYLQLKKLNESIDVFMNKYKTSSRNRALSNLKKDILKEVILIKNSNTSPVEKNLHFVWIGGEVSDIALEYIKQWADINAEYNIKLWYDSEAFLVNTLKKAIVESSTTEALQLLEEEIQNPQFDNMKFYKKRMEFIYDRQKRFINYYKSQINKPTVPTIDDIIKSHLVSEYNRDETVLESYRTNSLRKINSNHGIDIRANSLFTEQELLNIYSQGLLNRGNLAAASDIVRLLALKNFGGVALAVAMLPGIHSDLFKTISRPSSIGLDRWEMIKLEAIMKYKKYINNYTSENFDKLDQQLKDNFKLIIESKSEKSEIFSKLENLNVSDLEIKIAFALGSVINQALISKQGSYLTNLVIEQVKNRYQFLNQHLNPAIESDNNFTDTTKIFHDSLFNSATAENSMFLTKIAPYLQVGFMPEARSTISLSGPGAYASAYYDFINLQENTIEKTLKASDLIEFKFPENNLSQLTEQEINSLWSFDQASAKYQFEKYVRDYTGGS

SEQ ID NO: 547 - protein, 540 aa, synthetic construct; identical to SEQ ID NO: 245
  REGION 1..540: note = Synthetic amino acid sequence

SEQ ID NO: 548 - protein, 540 aa, synthetic construct; identical to SEQ ID NO: 245
  REGION 1..540: note = Synthetic amino acid sequence

SEQ ID NO: 549 - protein, 540 aa, synthetic construct; identical to SEQ ID NO: 245
  REGION 1..540: note = Synthetic amino acid sequence

SEQ ID NO: 550 - protein, 540 aa, synthetic construct; identical to SEQ ID NO: 245
  REGION 1..540: note = Synthetic amino acid sequence

SEQ ID NO: 551 - protein, 540 aa, synthetic construct; identical to SEQ ID NO: 245
  REGION 1..540: note = Synthetic amino acid sequence

SEQ ID NO: 552 - protein, 540 aa, synthetic construct; identical to SEQ ID NO: 245
  REGION 1..540: note = Synthetic amino acid sequence

SEQ ID NO: 553 - protein, 540 aa, synthetic construct; identical to SEQ ID NO: 245
  REGION 1..540: note = Synthetic amino acid sequence

SEQ ID NO: 554 - protein, 540 aa, synthetic construct; identical to SEQ ID NO: 245
  REGION 1..540: note = Synthetic amino acid sequence

SEQ ID NO: 555 - protein, 540 aa, synthetic construct
  REGION 1..540: note = Synthetic amino acid sequence
SLISKEELIKLAYSIRPRENEYKTILTNLDEYNKLTTNNNENKYLQLKKLNESIDVFMNKYKTSSRNRALSNLKKDILKEVILIKNSNTSPVEKNLHFVWIGGEVSDIALEYIKQWADINAEYNIKLWYDSEAFLVNTLKKAIVESSTTEALQLLEEEIQNPQFDNMKFYKKRMEFIYDRQKRFINYYKSQINKPTVPTIDDIIKSHLVSEYNRDETLLESYRTNSLRKINSNHGIDIRANSLFTEQELLNIYSQELLNRGNLAAASDIVRLLALKNFGGVALAVAMLPGIHSDLFKTISRPSSIGLDRWEMIKLEAIMKYKKYINNYTSENFDKLDQQLKDNFKLIIESKSEKSEIFSKLENLNVSDLEIKIAFALGSVINQALISKQGSYLTNLVIEQVKNRYQFLNQHLNPAIESDNNFTDTTKIFHDSLFNSATAENSMFLTKIAPYLQVGFMPEARSTISLSGPGAYASAYYDFINLQENTIEKTLKASDLIEFKFPENNLSQLTEQEINSLWSFDQASAKYQFEKYVRDYTGGS

SEQ ID NO: 556 - protein, 540 aa, synthetic construct; identical to SEQ ID NO: 245
  REGION 1..540: note = Synthetic amino acid sequence

SEQ ID NO: 557 - protein, 540 aa, synthetic construct; identical to SEQ ID NO: 526
  REGION 1..540: note = Synthetic amino acid sequence

SEQ ID NO: 558 - protein, 540 aa, synthetic construct; identical to SEQ ID NO: 245
  REGION 1..540: note = Synthetic amino acid sequence

SEQ ID NO: 559 - protein, 540 aa, synthetic construct; identical to SEQ ID NO: 526
  REGION 1..540: note = Synthetic amino acid sequence

SEQ ID NO: 560 - protein, 540 aa, synthetic construct; identical to SEQ ID NO: 245
  REGION 1..540: note = Synthetic amino acid sequence

SEQ ID NO: 561 - protein, 540 aa, synthetic construct; identical to SEQ ID NO: 526
  REGION 1..540: note = Synthetic amino acid sequence

SEQ ID NO: 562 - protein, 540 aa, synthetic construct; identical to SEQ ID NO: 526
  REGION 1..540: note = Synthetic amino acid sequence

SEQ ID NO: 563 - protein, 540 aa, synthetic construct; identical to SEQ ID NO: 526
  REGION 1..540: note = Synthetic amino acid sequence

SEQ ID NO: 564 - protein, 540 aa, synthetic construct; identical to SEQ ID NO: 546
  REGION 1..540: note = Synthetic amino acid sequence

SEQ ID NO: 565 - protein, 540 aa, synthetic construct; identical to SEQ ID NO: 526
  REGION 1..540: note = Synthetic amino acid sequence

SEQ ID NO: 566 - protein, 540 aa, synthetic construct; identical to SEQ ID NO: 245
  REGION 1..540: note = Synthetic amino acid sequence

SEQ ID NO: 567 - protein, 540 aa, synthetic construct; identical to SEQ ID NO: 245
  REGION 1..540: note = Synthetic amino acid sequence

SEQ ID NO: 568 - protein, 542 aa, synthetic construct
  REGION 1..542: note = Synthetic amino acid sequence
SLVNRKQLEKMANVRFRVQEDEYVAILDALEEYHNMSENTVVEKYLKLKDINSLTDIYIDTYKKSGRNKALKKFKEYLVTEVLELKNNNLTPVEKNLHFVWIGGQINDTAINYINQWKDVNSDYNVNVFYDSNAFLINTLKKTIVESATNDTLESFRENLNDPRFDYNKFYRKRMEIIYDKQKNFINYYKTQREENPDLIIDDIVKIYLSNEYSKDIDELNSYIEESLNKVTENSGNDVRNFEEFKGGESFKLYEQELVERWNLAAASDILRISALKEVGGVYLDVDMLPGIQPDLFESIEKPSSVTVDFWEMVKLEAIMKYKEYIPGYTSEHFDMLDEEVQSSFESVLASKSDKSEIFSSLGDMEASPLEVKIAFNSKGIINQGLISVKDSYCSNLIVKQIENRYKILNNSLNPAISEDNDFNTTTNAFIDSIMAEANADNGRFMMELGKYLRVGFFPDVKTTINLSGPEAYAAAYQDLLMFKEGSMNIHLIEADLRNFEISKTNISQSTEQEMASLWSFDDARAKAQFEEYKKNYFEGSL

SEQ ID NO: 569 - protein, 542 aa, synthetic construct
  REGION 1..542: note = Synthetic amino acid sequence
SLVNRKQLEKMANVRFRTQEDEYVAILDALEEYHNMSENTVVEKYLKLKDINSLTDIYIDTYKKSGRNKALKKFKEYLVTEVLELKNNNLTPVEKNLHFVWIGGQINDTAINYINQWKDVNSDYNVNVFYDSNAFLINTLKKTVVESAINDTLESFRENLNDPRFDYNKFFRKRMEIIYDKQKNFINYYKAQREENPELIIDDIVKTYLSNEYSKEIDELNTYIEESLNKITQNSGNDVRNFEEFKNGESFNLYEQELVERWNLAAASDILRISALKEIGGMYLDVDMLPGIQPDLFESIEKPSSVTVDFWEMTKLEAIMKYKEYIPEYTSEHFDMLDEEVQSSFESVLASKSDKSEIFSSLGDMEASPLEVKIAFNSKGIINQGLISVKDSYCSNLIVKQIENRYKILNNSLNPAISEDNDFNTTTNTFIDSIMAEANADNGRFMMELGKYLRVGFFPDVKTTINLSGPEAYAAAYQDLLMFKEGSMNIHLIEADLRNFEISKTNISQSTEQEMASLWSFDDARAKAQFEEYKRNYFEGSL

SEQ ID NO: 570 - protein, 542 aa, synthetic construct; identical to SEQ ID NO: 568
  REGION 1..542: note = Synthetic amino acid sequence

SEQ ID NO: 571 - protein, 542 aa, synthetic construct; identical to SEQ ID NO: 569
  REGION 1..542: note = Synthetic amino acid sequence

SEQ ID NO: 572 - protein, 542 aa, synthetic construct; identical to SEQ ID NO: 569
  REGION 1..542: note = Synthetic amino acid sequence

SEQ ID NO: 573 - protein, 542 aa, synthetic construct; identical to SEQ ID NO: 569
  REGION 1..542: note = Synthetic amino acid sequence

SEQ ID NO: 574 - protein, 542 aa, synthetic construct
  REGION 1..542: note = Synthetic amino acid sequence
SLVNRKQLEKMANVRFRTQEDEYVAILDALEEYHNMSENTVVEKYLKLKDINSLTDIYIDTYKKSGRNKALKKFKEYLVTEVLELKNNNLTPVEKNLHFVWIGGQINDTAINYINQWKDVNSDYNVNVFYDSNAFLINTLKKTIVESAINDTLESFRENLNNPRFDYNKFFRKRMEIIYDKQKNFINYYKAQREENPELIIDDIVKIYLSNEYSKEIDELNTYIEESLNKIKQNSGNDVRNFEEFKNGESFKLYEQELVERWNLAAASDILRISALKEIGGMYLDVDMLPGIQPDLFESIEKPSSVTVDFWEMTKLEAIMKYKEYIPGYTSEHFDMLDEEVQSSFESALASKSDKSEIFSSLGDMEASPLEVKIAFNSKGIINQGLISVKDSYCSNLIVKQIENRYKILNNSLNPAISEDNDFNTTTNTFIDSIMAEANADNGRFMMELGKYLRVGFFPDVKTTVNLSGPEAYAAAYQDLLMFKEGSMNIHLIEADLRNFEISKTNISQSTEQEMASLWTFDDARAKVQFEEYKRNYFEGSL

SEQ ID NO: 575 - protein, 542 aa, synthetic construct; identical to SEQ ID NO: 569
  REGION 1..542: note = Synthetic amino acid sequence

SEQ ID NO: 576 - protein, 542 aa, synthetic construct; identical to SEQ ID NO: 574
  REGION 1..542: note = Synthetic amino acid sequence

SEQ ID NO: 577 - protein, 542 aa, synthetic construct; identical to SEQ ID NO: 568
  REGION 1..542: note = Synthetic amino acid sequence

SEQ ID NO: 578 - protein, 542 aa, synthetic construct
  REGION 1..542: note = Synthetic amino acid sequence
SLVNRKQLEKMANVRFRTQEDEYVAILDALEEYHNMSENTVVEKYLKLKDINSLTDIYIDTYKKSGRNKALKKFKEYLVTEVLELKNNNLTPVEKNLHFVWIGGQINDTAINYINQWKDVNSDYNVNVFYDSNAFLINTLKKTVVESAINDTLESFRENLNDPRFDYNKFFRKRMEIIYDKQKNFINYYKAQREENPELIIDDIVKTYLSNEYSKEIDELNTYIEESLNKITQNSGNDVRNFEEFKNGESFNLYEQELVERWNLAAASDILRISALKEIGGMYLDVDMLPGIQPDLFESIEKPSSVTVDFWEMTKLEAIMKYKEYIPEYTSEHFDMLDEEVQSSFESVLASKSDKSEIFSSLGDMEASPLEVKIAFNSKGIINQGLISVKDSYCSNLIVKQIENRYKILNNSLNPAISEDNDFNTTTNTFIDSIMAEANADNGRFMMELGKYLRVGFFPDVKTTINLSGPEAYAAAYQDLLMFKEGSMNIHLIEADLRNFEIFKTNISQSTEQEMASLWSFDDARAKAQFEEYKRNYFEGSL

SEQ ID NO: 579 - protein, 543 aa, synthetic construct
  REGION 1..543: note = Synthetic amino acid sequence
SLVNRKQLEKMANVRFRVQEDEYVAILDALEEYHNMSENTVVEKYLKLKDINSLTDTYIDTYKKSGRNKALKKFKEYLVIEILELKNSNLTPVEKNLHFIWIGGQINDTAINYINQWKDVNSDYNVNVFYDSNAFLINTLKKTIIESASNDTLESFRENLNDPEFNHTAFFRKRMQIIYDKQQNFINYYKAQKEENPDLIIDDIVKTYLSNEYSKDIDELNAYIEESLNKVTENSGNDVRNFEEFKTGEVFNLYEQELVERWNLAGASDILRVAILKNIGGVYLDVDMLPGIHPDLFKDINKPDSVKTAVDWEEMQLEAIMKHKEYIPEYTSKHFDTLDEEVQSSFESVLASKSDKSEIFLPLGDIEVSPLEVKIAFAKGSIINQALISAKDSYCSDLLIKQIQNRYKILNDTLGPIISQGNDFNTTMNNFGESLGAIANEENISFIAKIGSYLRVGFYPEANTTITLSGPTIYAGAYKDLLTFKEMSIDTSILSSELRNFEFPKVNISQATEQEKNSLWQFNEERAKIQFEEYKKNYFEGAL

SEQ ID NO: 580 - protein, 542 aa, synthetic construct; identical to SEQ ID NO: 569
  REGION 1..542: note = Synthetic amino acid sequence

SEQ ID NO: 581 - protein, 542 aa, synthetic construct; identical to SEQ ID NO: 574
  REGION 1..542: note = Synthetic amino acid sequence

SEQ ID NO: 582 - protein, 542 aa, synthetic construct; identical to SEQ ID NO: 569
  REGION 1..542: note = Synthetic amino acid sequence

SEQ ID NO: 583 - protein, 542 aa, synthetic construct; identical to SEQ ID NO: 574
  REGION 1..542: note = Synthetic amino acid sequence

SEQ ID NO: 584 - protein, 543 aa, synthetic construct
  REGION 1..543: note = Synthetic amino acid sequence
SLVNRKQLEKMANVRFRVQEDEYVAILDALEEYHNMSENTVVEKYLKLKDINSLTDTYIDTYKKSGRNKALKKFKEYLVTEILELKNSNLTPVEKNLHFIWIGGQINDTAINYINQWKDVNSDYNVNVFYDSNAFLINTLKKTIIESASNDTLESFRENLNDPEFNHTAFFRKRMQIIYDKQQNFINYYKAQKEENPDLIIDDIVKTYLSNEYSKDIDELNAYIEESLNKVTENSGNDVRNFEEFKTGEVFNLYEQELVERWNLAGASDILRVAILKNIGGVYLDVDMLPGIHPDLFKDINKPDSVKTAVDWEEMQLEAIMKYKEYIPEYTSKHFDTLDEEVQSSFESVLASKSDKSEIFLPLGDIEVSPLEVKIAFAKGSIINQALISAKDSYCSDLLIKQIQNRYKILNDTLGPIISQGNDFNTTMNNFGESLGAIANEENISFIAKIGSYLRVGFYPEANTTITLSGPTIYAGAYKDLLTFKEMSIDTSILSSELRNFEFPKVNISQATEQEKNSLWQFNEERAKIQFEEYKKNYFEGAL

SEQ ID NO: 585 - protein, 543 aa, synthetic construct; identical to SEQ ID NO: 584
  REGION 1..543: note = Synthetic amino acid sequence

SEQ ID NO: 586 - protein, 543 aa, synthetic construct; identical to SEQ ID NO: 584
  REGION 1..543: note = Synthetic amino acid sequence

SEQ ID NO: 587 - protein, 542 aa, synthetic construct; identical to SEQ ID NO: 569
  REGION 1..542: note = Synthetic amino acid sequence

SEQ ID NO: 588 - protein, 542 aa, synthetic construct; identical to SEQ ID NO: 569
  REGION 1..542: note = Synthetic amino acid sequence

SEQ ID NO: 589 - protein, 542 aa, synthetic construct; identical to SEQ ID NO: 569
  REGION 1..542: note = Synthetic amino acid sequence

SEQ ID NO: 590 - protein, 542 aa, synthetic construct; identical to SEQ ID NO: 569
  REGION 1..542: note = Synthetic amino acid sequence

SEQ ID NO: 591 - protein, 542 aa, synthetic construct; identical to SEQ ID NO: 568
  REGION 1..542: note = Synthetic amino acid sequence

SEQ ID NO: 592 - protein, 542 aa, synthetic construct; identical to SEQ ID NO: 569
  REGION 1..542: note = Synthetic amino acid sequence

SEQ ID NO: 593 - protein, 542 aa, synthetic construct; identical to SEQ ID NO: 569
  REGION 1..542: note = Synthetic amino acid sequence

SEQ ID NO: 594 - protein, 542 aa, synthetic construct
  REGION 1..542: note = Synthetic amino acid sequence
SLVNRKQLEKMANVRFRTQEDEYVAILDALEEYHNMSENTVVEKYLKLKDINSLTDIYIDTYKKSGRNKALKKFKEYLVTEVLELKNNNLTPVEKNLHFVWIGGQINDTAINYINQWKDVNSDYNVNVFYDSNAFLINTLKKTVVESAINDTLESFRENLNDPRFDYNKFFRKRMEIIYDKQKNFINYYKAQREENPELIIDDIVKTYLSNEYSKEIDELNTYIEESLNKITQNSGNDVRNFEEFKNGESFNLYEQELVERWNLAAASDILRISALKEIGGMYLDVDMLPGIQPGLFESIEKPSSVTVDFWEMTKLEAIMKYKEYIPEYTSEHFDMLDEEVQSSFESVLASKSDKSEIFSSLGDMEASPLEVKIAFNSKGIINQGLISVKDSYCSNLIVKQIENRYKILNNSLNPAISEDNDFNTTTNTFIDSIMAEANADNGRFMMELGKYLRVGFFPDVKTTINLSGPEAYAAAYQDLLMFKEGSMNIHLIEADLRNFEISKTNISQSTEQEMASLWSFDDARAKAQFEEYKRNYFEGSL

SEQ ID NO: 595 - protein, 542 aa, synthetic construct; identical to SEQ ID NO: 594
  REGION 1..542: note = Synthetic amino acid sequence

SEQ ID NO: 596 - protein, 542 aa, synthetic construct; identical to SEQ ID NO: 569
  REGION 1..542: note = Synthetic amino acid sequence

SEQ ID NO: 597 - protein, 542 aa, synthetic construct; identical to SEQ ID NO: 569
  REGION 1..542: note = Synthetic amino acid sequence

SEQ ID NO: 598 - protein, 543 aa, synthetic construct; identical to SEQ ID NO: 579
  REGION 1..543: note = Synthetic amino acid sequence

SEQ ID NO: 599 - protein, 542 aa, synthetic construct
  REGION 1..542: note = Synthetic amino acid sequence
SLVNRKQLEKMANVRFRTQEDEYVAILDALEEYHNMSENTVVEKYLKLKDINSLTDIYIDTYKKSGRNKALKKFKEYLVTEVLELKNNNLTPVEKNLHFVWIGGQINDTAINYINQWKDVNSDYNVNVFYDSNAFLINTLKKTVVESAINDTLESFRENLNDPRFDYNKFFRKRMEIIYDKQKNFINYYKAQREENPELIIDDIVKTYLSNEYSKEIDELNTYIEESLNKITQNSGNDVRNFEEFKNGESFNLYEQELVERWNLAAASDILRISALKEIGGMYLDVDMLPGIQPDLFESIEKPSSVTVDFWEMTKLEAIMKYKEYIPEYTSEHFDMLDEEVQSSFESVLASKSDKSEIFSSLGDMEASPLEVKIAFNSKGIINQGLISVKDSYCSNLIVKQIENRYKILNNSLNPAISEDNDFNTTTNTFIDSIMAEANADNGRFMMELGKYLRVGFFPDVKTTINLSGPEAYAAAYQDLLMFKEGSMNIHLIEADLRNFEISKTNISQSTEQEMASLWSFDDSRAKAQFEEYKRNYFEGSL

SEQ ID NO: 600 - protein, 542 aa, synthetic construct; identical to SEQ ID NO: 599
  REGION 1..542: note = Synthetic amino acid sequence

SEQ ID NO: 601 - protein, 542 aa, synthetic construct; identical to SEQ ID NO: 599
  REGION 1..542: note = Synthetic amino acid sequence

SEQ ID NO: 602 - protein, 542 aa, synthetic construct
  REGION 1..542: note = Synthetic amino acid sequence
SLVNRKQLEKMANVRFRTQEDEYVAILDALEEYHNMSENTVVEKYLKLKDINSLTDIYIDTYKKSGRNKALKKFKEYLVTEVLELKNNNLTPVEKNLHFVWIGGQINDTAINYINQWKDVNSDYNVNVFYDSNAFLINTLKKTVVESAINDTLESFRENLNDPRFDYNKFFRKRMEIIYDKQKNFINYYKAQREENPELIIDDIVKTYLSNEYSKEIDELNTYIEESLNKITQNSGNDVRNFEEFKNGESFNLYEQELVERWNLAAASDILRISALKEIGGMYLDVDMLPGIQPDLFESIEKPSSVTVDFWEMTKLEAIMKYKEYIPEYTSEHFDMLDEEVQSSFESVLASKSDKSEIFSSLGDMEASPLEVKIAFNSKGIINQGLISVKDSYCSNLIVKQIENRYKILNNSLNPAISEDNDFNTTTNTFIDSIMAEANADNGRFMMELGKYLRVGFFPDVKTTINLSGPEAYAAAYQDLLMFKEGSMNIHLIEADLRNFEIFKTNISQSTEQEMASLWSFDDSRAKAQFEEYKRNYFEGSL

SEQ ID NO: 603 - protein, 542 aa, synthetic construct; identical to SEQ ID NO: 602
  REGION 1..542: note = Synthetic amino acid sequence

SEQ ID NO: 604 - protein, 542 aa, synthetic construct; identical to SEQ ID NO: 569
  REGION 1..542: note = Synthetic amino acid sequence

SEQ ID NO: 605 - protein, 542 aa, synthetic construct; identical to SEQ ID NO: 594
  REGION 1..542: note = Synthetic amino acid sequence

SEQ ID NO: 606 - protein, 542 aa, synthetic construct
  REGION 1..542: note = Synthetic amino acid sequence
SLVNRKQLEKMANVRFRTQEDEYVAILDALEEYHNMSENTVVEKYLKLKDINSLTDIYIDTYKKSGRNKALKKFKEYLVTEVLELKNNNLTPVEKNLHFVWIGGQINDTAINYINQWKDVNSDYNVNVFYDSNAFLINTLKKTIVESAINDTLESFRENLNNPRFDYNKFFRKRMEIIYDKQKNFINYYKAQREENPELIIDDIVKIYLSNEYSKEIDELNTYIEESLNKIKQNSGNDVRNFEEFKNGESFKLYEQELVERWNLAAASDILRISALKEIGGMYLDVDMLPGIQPGLFESIEKPSSVTVDFWEMTKLEAIMKYKEYIPGYTSEHFDMLDEEVQSSFESALASKSDKSEIFSSLGDMEASPLEVKIAFNSKGIINQGLISVKDSYCSNLIVKQIENRYKILNNSLNPAISEDNDFNTTTNTFIDSIMAEANADNGRFMMELGKYLRVGFFPDVKTTVNLSGPEAYAAAYQDLLMFKEGSMNIHLIEADLRNFEISKTNISQSTEQEMASLWTFDDARAKVQFEEYKRNYFEGSL

SEQ ID NO: 607 - protein, 542 aa, synthetic construct; identical to SEQ ID NO: 606
  REGION 1..542: note = Synthetic amino acid sequence

SEQ ID NO: 608 - protein, 542 aa, synthetic construct; identical to SEQ ID NO: 574
  REGION 1..542: note = Synthetic amino acid sequence

SEQ ID NO: 609 - protein, 542 aa, synthetic construct; identical to SEQ ID NO: 606
  REGION 1..542: note = Synthetic amino acid sequence

SEQ ID NO: 610 - protein, 542 aa, synthetic construct; identical to SEQ ID NO: 574
  REGION 1..542: note = Synthetic amino acid sequence

SEQ ID NO: 611 - protein, 542 aa, synthetic construct; identical to SEQ ID NO: 574
  REGION 1..542: note = Synthetic amino acid sequence

SEQ ID NO: 612 - protein, 542 aa, synthetic construct; identical to SEQ ID NO: 574
  REGION 1..542: note = Synthetic amino acid sequence

SEQ ID NO: 613 - protein, 542 aa, synthetic construct; identical to SEQ ID NO: 606
  REGION 1..542: note = Synthetic amino acid sequence

SEQ ID NO: 614 - protein, 542 aa, synthetic construct; identical to SEQ ID NO: 574
  REGION 1..542: note = Synthetic amino acid sequence

SEQ ID NO: 615 - protein, 542 aa, synthetic construct
  REGION 1..542: note = Synthetic amino acid sequence
SLVNRKQLEKMANVRFRTQEDEYVAILDALEEYHNMSENTVVEKYLKLKDINSLTDIYIDTYKKSGRNKALKKFKEYLVIEVLELKNNNLTPVEKNLHFVWIGGQINDTAINYINQWKDVNSDYNVNVFYDSNAFLINTLKKTIVESAINDTLESFRENLNNPRFDYNKFFRKRMEIIYDKQKNFINYYKAQREENPELIIDDIVKIYLSNEYSKEIDELNTYIEESLNKIKQNSGNDVRNFEEFKNGESFKLYEQELVERWNLAAASDILRISALKEIGGMYLDVDMLPGIQPGLFESIEKPSSVTVDFWEMTKLEAIMKYKEYIPGYTSEHFDMLDEEVQSSFESALASKSDKSEIFSSLGDMEASPLEVKIAFNSKGIINQGLISVKDSYCSNLIVKQIENRYKILNNSLNPAISEDNDFNTTTNTFIDSIMAEANADNGRFMMELGKYLRVGFFPDVKTTVNLSGPEAYAAAYQDLLMFKEGSMNIHLIEADLRNFEISKTNISQSTEQEMASLWTFDDARAKVQFEEYKRNYFEGSL

SEQ ID NO: 616 - protein, 542 aa, synthetic construct
  REGION 1..542: note = Synthetic amino acid sequence
SLVNRKQLEKMANVRFRVQEDEYVAILDALEEYHNMSENTVVEKYLKLKDINSLTDIYIDTYKKSGRNKALKKFKEYLVTEVLELKNNNLTPVEKNLHFVWIGGQINDTAINYINQWKDVNSDYNVNVFYDSNAFLINTLKKTIVESATNDTLESFRENLNDPRFDYNKFYRKRMEIIYDKQKNFINYYKTQREENPDLIIDDIVKIYLSNEYSKDIDELNSYIEESLNKVTENSGNDVRNFEEFKGGESFKLYEQELVERWNLAAASAILAISALKEVGGVALAVAMLPGIQPDLFESIEKPSSVTVDFWEMVKLEAIMKYKEYIPGYTSEHFDMLDEEVQSSFESVLASKSDKSEIFSSLGDMEASPLEVKIAFNSKGIINQGLISVKDSYCSNLIVKQIENRYKILNNSLNPAISEDNDFNTTTNAFIDSIMAEANADNGRFMMELGKYLRVGFFPDVKTTINLSGPEAYAAAYQDLLMFKEGSMNIHLIEADLRNFEISKTNISQSTEQEMASLWSFDDARAKAQFEEYKKNYFEGSL

SEQ ID NO: 617 - protein, 542 aa, synthetic construct; identical to SEQ ID NO: 247
  REGION 1..542: note = Synthetic amino acid sequence

SEQ ID NO: 618 - protein, 542 aa, synthetic construct; identical to SEQ ID NO: 616
  REGION 1..542: note = Synthetic amino acid sequence

SEQ ID NO: 619 - protein, 542 aa, synthetic construct; identical to SEQ ID NO: 247
  REGION 1..542: note = Synthetic amino acid sequence

SEQ ID NO: 620 - protein, 542 aa, synthetic construct; identical to SEQ ID NO: 247
  REGION 1..542: note = Synthetic amino acid sequence

SEQ ID NO: 621 - protein, 542 aa, synthetic construct; identical to SEQ ID NO: 247
  REGION 1..542: note = Synthetic amino acid sequence

SEQ ID NO: 622 - protein, 542 aa, synthetic construct
  REGION 1..542: note = Synthetic amino acid sequence
SLVNRKQLEKMANVRFRTQEDEYVAILDALEEYHNMSENTVVEKYLKLKDINSLTDIYIDTYKKSGRNKALKKFKEYLVTEVLELKNNNLTPVEKNLHFVWIGGQINDTAINYINQWKDVNSDYNVNVFYDSNAFLINTLKKTIVESAINDTLESFRENLNNPRFDYNKFFRKRMEIIYDKQKNFINYYKAQREENPELIIDDIVKIYLSNEYSKEIDELNTYIEESLNKIKQNSGNDVRNFEEFKNGESFKLYEQELVERWNLAAASAILAISALKEIGGMALAVAMLPGIQPDLFESIEKPSSVTVDFWEMTKLEAIMKYKEYIPGYTSEHFDMLDEEVQSSFESALASKSDKSEIFSSLGDMEASPLEVKIAFNSKGIINQGLISVKDSYCSNLIVKQIENRYKILNNSLNPAISEDNDFNTTTNTFIDSIMAEANADNGRFMMELGKYLRVGFFPDVKTTVNLSGPEAYAAAYQDLLMFKEGSMNIHLIEADLRNFEISKTNISQSTEQEMASLWTFDDARAKVQFEEYKRNYFEGSL

SEQ ID NO: 623 - protein, 542 aa, synthetic construct; identical to SEQ ID NO: 247
  REGION 1..542: note = Synthetic amino acid sequence

SEQ ID NO: 624 - protein, 542 aa, synthetic construct; identical to SEQ ID NO: 622
  REGION 1..542: note = Synthetic amino acid sequence

SEQ ID NO: 625 - protein, 542 aa, synthetic construct; identical to SEQ ID NO: 616
  REGION 1..542: note = Synthetic amino acid sequence

SEQ ID NO: 626 - protein, 542 aa, synthetic construct
  REGION 1..542: note = Synthetic amino acid sequence
SLVNRKQLEKMANVRFRTQEDEYVAILDALEEYHNMSENTVVEKYLKLKDINSLTDIYIDTYKKSGRNKALKKFKEYLVTEVLELKNNNLTPVEKNLHFVWIGGQINDTAINYINQWKDVNSDYNVNVFYDSNAFLINTLKKTVVESAINDTLESFRENLNDPRFDYNKFFRKRMEIIYDKQKNFINYYKAQREENPELIIDDIVKTYLSNEYSKEIDELNTYIEESLNKITQNSGNDVRNFEEFKNGESFNLYEQELVERWNLAAASAILAISALKEIGGMALAVAMLPGIQPDLFESIEKPSSVTVDFWEMTKLEAIMKYKEYIPEYTSEHFDMLDEEVQSSFESVLASKSDKSEIFSSLGDMEASPLEVKIAFNSKGIINQGLISVKDSYCSNLIVKQIENRYKILNNSLNPAISEDNDFNTTTNTFIDSIMAEANADNGRFMMELGKYLRVGFFPDVKTTINLSGPEAYAAAYQDLLMFKEGSMNIHLIEADLRNFEIFKTNISQSTEQEMASLWSFDDARAKAQFEEYKRNYFEGSL

SEQ ID NO: 627 - protein, 543 aa, synthetic construct
  REGION 1..543: note = Synthetic amino acid sequence
SLVNRKQLEKMANVRFRVQEDEYVAILDALEEYHNMSENTVVEKYLKLKDINSLTDTYIDTYKKSGRNKALKKFKEYLVIEILELKNSNLTPVEKNLHFIWIGGQINDTAINYINQWKDVNSDYNVNVFYDSNAFLINTLKKTIIESASNDTLESFRENLNDPEFNHTAFFRKRMQIIYDKQQNFINYYKAQKEENPDLIIDDIVKTYLSNEYSKDIDELNAYIEESLNKVTENSGNDVRNFEEFKTGEVFNLYEQELVERWNLAGASAILAVAILKNIGGVALAVAMLPGIHPDLFKDINKPDSVKTAVDWEEMQLEAIMKHKEYIPEYTSKHFDTLDEEVQSSFESVLASKSDKSEIFLPLGDIEVSPLEVKIAFAKGSIINQALISAKDSYCSDLLIKQIQNRYKILNDTLGPIISQGNDFNTTMNNFGESLGAIANEENISFIAKIGSYLRVGFYPEANTTITLSGPTIYAGAYKDLLTFKEMSIDTSILSSELRNFEFPKVNISQATEQEKNSLWQFNEERAKIQFEEYKKNYFEGAL

SEQ ID NO: 628 - protein, 542 aa, synthetic construct; identical to SEQ ID NO: 247
  REGION 1..542: note = Synthetic amino acid sequence

SEQ ID NO: 629 - protein, 542 aa, synthetic construct; identical to SEQ ID NO: 622
  REGION 1..542: note = Synthetic amino acid sequence

SEQ ID NO: 630 - protein, 542 aa, synthetic construct; identical to SEQ ID NO: 247
  REGION 1..542: note = Synthetic amino acid sequence

SEQ ID NO: 631 - protein, 542 aa, synthetic construct; identical to SEQ ID NO: 622
  REGION 1..542: note = Synthetic amino acid sequence

SEQ ID NO: 632 - protein, 543 aa, synthetic construct
  REGION 1..543: note = Synthetic amino acid sequence
SLVNRKQLEKMANVRFRVQEDEYVAILDALEEYHNMSENTVVEKYLKLKDINSLTDTYIDTYKKSGRNKALKKFKEYLVTEILELKNSNLTPVEKNLHFIWIGGQINDTAINYINQWKDVNSDYNVNVFYDSNAFLINTLKKTIIESASNDTLESFRENLNDPEFNHTAFFRKRMQIIYDKQQNFINYYKAQKEENPDLIIDDIVKTYLSNEYSKDIDELNAYIEESLNKVTENSGNDVRNFEEFKTGEVFNLYEQELVERWNLAGASAILAVAILKNIGGVALAVAMLPGIHPDLFKDINKPDSVKTAVDWEEMQLEAIMKYKEYIPEYTSKHFDTLDEEVQSSFESVLASKSDKSEIFLPLGDIEVSPLEVKIAFAKGSIINQALISAKDSYCSDLLIKQIQNRYKILNDTLGPIISQGNDFNTTMNNFGESLGAIANEENISFIAKIGSYLRVGFYPEANTTITLSGPTIYAGAYKDLLTFKEMSIDTSILSSELRNFEFPKVNISQATEQEKNSLWQFNEERAKIQFEEYKKNYFEGAL

SEQ ID NO: 633 - protein, 543 aa, synthetic construct; identical to SEQ ID NO: 632
  REGION 1..543: note = Synthetic amino acid sequence

SEQ ID NO: 634 - protein, 543 aa, synthetic construct; identical to SEQ ID NO: 632
  REGION 1..543: note = Synthetic amino acid sequence

SEQ ID NO: 635 - protein, 542 aa, synthetic construct; identical to SEQ ID NO: 247
  REGION 1..542: note = Synthetic amino acid sequence

SEQ ID NO: 636 - protein, 542 aa, synthetic construct; identical to SEQ ID NO: 247
  REGION 1..542: note = Synthetic amino acid sequence

SEQ ID NO: 637 - protein, 542 aa, synthetic construct; identical to SEQ ID NO: 247
  REGION 1..542: note = Synthetic amino acid sequence

SEQ ID NO: 638 - protein, 542 aa, synthetic construct; identical to SEQ ID NO: 247
  REGION 1..542: note = Synthetic amino acid sequence

SEQ ID NO: 639 - protein, 542 aa, synthetic construct; identical to SEQ ID NO: 616
  REGION 1..542: note = Synthetic amino acid sequence

SEQ ID NO: 640 - protein, 542 aa, synthetic construct; identical to SEQ ID NO: 247
  REGION 1..542: note = Synthetic amino acid sequence

SEQ ID NO: 641 - protein, 542 aa, synthetic construct; identical to SEQ ID NO: 247
  REGION 1..542: note = Synthetic amino acid sequence

SEQ ID NO: 642 - protein, 542 aa, synthetic construct
  REGION 1..542: note = Synthetic amino acid sequence
SLVNRKQLEKMANVRFRTQEDEYVAILDALEEYHNMSENTVVEKYLKLKDINSLTDIYIDTYKKSGRNKALKKFKEYLVTEVLELKNNNLTPVEKNLHFVWIGGQINDTAINYINQWKDVNSDYNVNVFYDSNAFLINTLKKTVVESAINDTLESFRENLNDPRFDYNKFFRKRMEIIYDKQKNFINYYKAQREENPELIIDDIVKTYLSNEYSKEIDELNTYIEESLNKITQNSGNDVRNFEEFKNGESFNLYEQELVERWNLAAASAILAISALKEIGGMALAVAMLPGIQPGLFESIEKPSSVTVDFWEMTKLEAIMKYKEYIPEYTSEHFDMLDEEVQSSFESVLASKSDKSEIFSSLGDMEASPLEVKIAFNSKGIINQGLISVKDSYCSNLIVKQIENRYKILNNSLNPAISEDNDFNTTTNTFIDSIMAEANADNGRFMMELGKYLRVGFFPDVKTTINLSGPEAYAAAYQDLLMFKEGSMNIHLIEADLRNFEISKTNISQSTEQEMASLWSFDDARAKAQFEEYKRNYFEGSL

SEQ ID NO: 643 - protein, 542 aa, synthetic construct; identical to SEQ ID NO: 642
  REGION 1..542: note = Synthetic amino acid sequence

SEQ ID NO: 644 - protein, 542 aa, synthetic construct; identical to SEQ ID NO: 247
  REGION 1..542: note = Synthetic amino acid sequence

SEQ ID NO: 645 - protein, 542 aa, synthetic construct; identical to SEQ ID NO: 247
  REGION 1..542: note = Synthetic amino acid sequence

SEQ ID NO: 646 - protein, 543 aa, synthetic construct; identical to SEQ ID NO: 627
  REGION 1..543: note = Synthetic amino acid sequence

SEQ ID NO: 647 - protein, 542 aa, synthetic construct
  REGION 1..542: note = Synthetic amino acid sequence
SLVNRKQLEKMANVRFRTQEDEYVAILDALEEYHNMSENTVVEKYLKLKDINSLTDIYIDTYKKSGRNKALKKFKEYLVTEVLELKNNNLTPVEKNLHFVWIGGQINDTAINYINQWKDVNSDYNVNVFYDSNAFLINTLKKTVVESAINDTLESFRENLNDPRFDYNKFFRKRMEIIYDKQKNFINYYKAQREENPELIIDDIVKTYLSNEYSKEIDELNTYIEESLNKITQNSGNDVRNFEEFKNGESFNLYEQELVERWNLAAASAILAISALKEIGGMALAVAMLPGIQPDLFESIEKPSSVTVDFWEMTKLEAIMKYKEYIPEYTSEHFDMLDEEVQSSFESVLASKSDKSEIFSSLGDMEASPLEVKIAFNSKGIINQGLISVKDSYCSNLIVKQIENRYKILNNSLNPAISEDNDFNTTTNTFIDSIMAEANADNGRFMMELGKYLRVGFFPDVKTTINLSGPEAYAAAYQDLLMFKEGSMNIHLIEADLRNFEISKTNISQSTEQEMASLWSFDDSRAKAQFEEYKRNYFEGSL

SEQ ID NO: 648 - protein, 542 aa, synthetic construct; identical to SEQ ID NO: 647
  REGION 1..542: note = Synthetic amino acid sequence

SEQ ID NO: 649 - protein, 542 aa, synthetic construct; identical to SEQ ID NO: 647
  REGION 1..542: note = Synthetic amino acid sequence

SEQ ID NO: 650 - protein, 542 aa, synthetic construct
  REGION 1..542: note = Synthetic amino acid sequence
SLVNRKQLEKMANVRFRTQEDEYVAILDALEEYHNMSENTVVEKYLKLKDINSLTDIYIDTYKKSGRNKALKKFKEYLVTEVLELKNNNLTPVEKNLHFVWIGGQINDTAINYINQWKDVNSDYNVNVFYDSNAFLINTLKKTVVESAINDTLESFRENLNDPRFDYNKFFRKRMEIIYDKQKNFINYYKAQREENPELIIDDIVKTYLSNEYSKEIDELNTYIEESLNKITQNSGNDVRNFEEFKNGESFNLYEQELVERWNLAAASAILAISALKEIGGMALAVAMLPGIQPDLFESIEKPSSVTVDFWEMTKLEAIMKYKEYIPEYTSEHFDMLDEEVQSSFESVLASKSDKSEIFSSLGDMEASPLEVKIAFNSKGIINQGLISVKDSYCSNLIVKQIENRYKILNNSLNPAISEDNDFNTTTNTFIDSIMAEANADNGRFMMELGKYLRVGFFPDVKTTINLSGPEAYAAAYQDLLMFKEGSMNIHLIEADLRNFEIFKTNISQSTEQEMASLWSFDDSRAKAQFEEYKRNYFEGSL

SEQ ID NO: 651 - protein, 542 aa, synthetic construct; identical to SEQ ID NO: 650
  REGION 1..542: note = Synthetic amino acid sequence

SEQ ID NO: 652 - protein, 542 aa, synthetic construct; identical to SEQ ID NO: 247
  REGION 1..542: note = Synthetic amino acid sequence

SEQ ID NO: 653 - protein, 542 aa, synthetic construct; identical to SEQ ID NO: 642
  REGION 1..542: note = Synthetic amino acid sequence

SEQ ID NO: 654 - protein, 542 aa, synthetic construct
  REGION 1..542: note = Synthetic amino acid sequence
SLVNRKQLEKMANVRFRTQEDEYVAILDALEEYHNMSENTVVEKYLKLKDINSLTDIYIDTYKKSGRNKALKKFKEYLVTEVLELKNNNLTPVEKNLHFVWIGGQINDTAINYINQWKDVNSDYNVNVFYDSNAFLINTLKKTIVESAINDTLESFRENLNNPRFDYNKFFRKRMEIIYDKQKNFINYYKAQREENPELIIDDIVKIYLSNEYSKEIDELNTYIEESLNKIKQNSGNDVRNFEEFKNGESFKLYEQELVERWNLAAASAILAISALKEIGGMALAVAMLPGIQPGLFESIEKPSSVTVDFWEMTKLEAIMKYKEYIPGYTSEHFDMLDEEVQSSFESALASKSDKSEIFSSLGDMEASPLEVKIAFNSKGIINQGLISVKDSYCSNLIVKQIENRYKILNNSLNPAISEDNDFNTTTNTFIDSIMAEANADNGRFMMELGKYLRVGFFPDVKTTVNLSGPEAYAAAYQDLLMFKEGSMNIHLIEADLRNFEISKTNISQSTEQEMASLWTFDDARAKVQFEEYKRNYFEGSL

SEQ ID NO: 655 - protein, 542 aa, synthetic construct; identical to SEQ ID NO: 654
  REGION 1..542: note = Synthetic amino acid sequence

SEQ ID NO: 656 - protein, 542 aa, synthetic construct; identical to SEQ ID NO: 622
  REGION 1..542: note = Synthetic amino acid sequence

SEQ ID NO: 657 - protein, 542 aa, synthetic construct; identical to SEQ ID NO: 654
  REGION 1..542: note = Synthetic amino acid sequence

SEQ ID NO: 658 - protein, 542 aa, synthetic construct; identical to SEQ ID NO: 622
  REGION 1..542: note = Synthetic amino acid sequence

SEQ ID NO: 659 - protein, 542 aa, synthetic construct; identical to SEQ ID NO: 622
  REGION 1..542: note = Synthetic amino acid sequence

SEQ ID NO: 660 - protein, 542 aa, synthetic construct; identical to SEQ ID NO: 622
  REGION 1..542: note = Synthetic amino acid sequence

SEQ ID NO: 661 - protein, 542 aa, synthetic construct; identical to SEQ ID NO: 654
  REGION 1..542: note = Synthetic amino acid sequence

SEQ ID NO: 662 - protein, 542 aa, synthetic construct; identical to SEQ ID NO: 622
  REGION 1..542: note = Synthetic amino acid sequence

SEQ ID NO: 663 - protein, 542 aa, synthetic construct
  REGION 1..542: note = Synthetic amino acid sequence
SLVNRKQLEKMANVRFRTQEDEYVAILDALEEYHNMSENTVVEKYLKLKDINSLTDIYIDTYKKSGRNKALKKFKEYLVIEVLELKNNNLTPVEKNLHFVWIGGQINDTAINYINQWKDVNSDYNVNVFYDSNAFLINTLKKTIVESAINDTLESFRENLNNPRFDYNKFFRKRMEIIYDKQKNFINYYKAQREENPELIIDDIVKIYLSNEYSKEIDELNTYIEESLNKIKQNSGNDVRNFEEFKNGESFKLYEQELVERWNLAAASAILAISALKEIGGMALAVAMLPGIQPGLFESIEKPSSVTVDFWEMTKLEAIMKYKEYIPGYTSEHFDMLDEEVQSSFESALASKSDKSEIFSSLGDMEASPLEVKIAFNSKGIINQGLISVKDSYCSNLIVKQIENRYKILNNSLNPAISEDNDFNTTTNTFIDSIMAEANADNGRFMMELGKYLRVGFFPDVKTTVNLSGPEAYAAAYQDLLMFKEGSMNIHLIEADLRNFEISKTNISQSTEQEMASLWTFDDARAKVQFEEYKRNYFEGSL

SEQ ID NO: 664 - protein, 2709 aa, synthetic construct
  REGION 1..2709: note = Synthetic amino acid sequence
SLISKEELIKLAYSIRPRENEYKTILTNLDEYNKLTTNNNENKYLQLKKLNESIDVFMNKYKNSSRNRALSNLKKDILKEVILIKNSNTSPVEKNLHFVWIGGEVSDIALEYIKQWADINAEYNIKLWYDSEAFLVNTLKKAIVESSTTEALQLLEEEIQNPQFDNMKFYKKRMEFIYDRQKRFINYYKSQINKPTVPTIDDIIKSHLVSEYNRDETLLESYRTNSLRKINSNHGIDIRANSLFTEQELLNIYSQELLNRGNLAAASDIVRLLALKNFGGVYLAVAMLPGIHSDLFKTIPRPSSIGLDRWEMIKLEAIMKYKKYINNYTSENFDKLDQQLKDNFKLIIESKSEKSEIFSKLENLNVSDLEIKIAFALGSVINQALISKQGSYLTNLVIEQVKNRYQFLNQHLNPAIESDNNFTDTTKIFHDSLFNSATAENSMFLTKIAPYLQVGFMPEARSTISLSGPGAYASAYYDFINLQENTIEKTLKASDLIEFKFPENNLSQLTEQEINSLWSFDQASAKYQFEKYVRDYTGGSLSEDNGVDFNKNTALDKNYLLNNKIPSNNVEEAGSKNYVHYIIQLQGDDISYEATCNLFSKNPKNSIIIQRNMNESAKSYFLSDDGESILELNKYRIPERLKNKEKVKVTFIGHGKDEFNTSEFARLSVDSLSNEISSFLDTIKLDISPKNVEVNLLGANMFSYDFNVEETYPGKLLLSIMDKITSTLPDVNKDSITIGANQYEVRINSEGRKELLAHSGKWINKEEAIMSDLSSKEYIFFDSIDNKLKAKSKNIPGLASISEDIKTLLLDASVSPDTKFILNNLKLNIESSIGDYIYYEKLEPVKNIIHNSIDDLIDEFNLLENVSDELYELKKLNNLDEKYLISFEDISKNNSTYSVRFINKSNGESVYVETEKEIFSKYSEHITKEISTIKNSIITDVNGNLLDNIQLDHTSQVNTLNAAFFIQSLIDYSSNKDVLNDLSTSVKVQLYAQLFSTGLNTIYDSIQLVNLISNAVNDTINVLPTITEGIPIVSTILDGINLGAAIKELLDEHDPLLKKELEAKVGVLAINMSLSIAATVASIVGIGAEVTIFLLPIAGISAGIPSLVNNELILHDKATSVVNYFNHLSESKEYGPLKTEDDKILVPIDDLVISEIDFNNNSIKLGTCNILAMEGGSGHTVTGNIDHFFSSPYISSHIPSLSVYSAIGIKTENLDFSKKIMMLPNAPSRVFWWETGAVPGLRSLENNGTKLLDSIRDLYPGKFYWRFYAFFDYAITTLKPVYEDTNTKIKLDKDTRNFIMPTITTDEIRNKLSYSFDGAGGTYSLLLSSYPISMNINLSKDDLWIFNIDNEVREISIENGTIKKGNLIEDVLSKIDINKNKLIIGNQTIDFSGDIDNKDRYIFLTCELDDKISLIIEINLVAKSYSLLLSGDKNYLISNLSNTIEKINTLGLDSKNIAYNYTDESNNKYFGAISKTSQKSIIHYKKDSKNILEFYNGSTLEFNSKDFIAEDINVFMKDDINTITGKYYVDNNTDKSIDFSISLVSKNQVKVNGLYLNESVYSSYLDFVKNSDGHHNTSNFMNLFLNNISFWKLFGFENINFVIDKYFTLVGKTNLGYVEFICDNNKNIDIYFGEWKTSSSKSTIFSGNGRNVVVEPIYNPDTGEDISTSLDFSYEPLYGIDRYINKVLIAPDLYTSLININTNYYSNEYYPEIIVLNPNTFHKKVNINLDSSSFEYKWSTEGSDFILVRYLEESNKKILQKIRIKGILSNTQSFNKMSIDFKDIKKLSLGYIMSNFKSFNSENELDRDHLGFKIIDNKTYYYDEDSKLVKGLININNSLFYFDPIESNLVTGWQTINGKKYYFDINTGAASTSYKIINGKHFYFNNNGVMQLGVFKGPDGFEYFAPANTQNNNIEGQAIVYQSKFLTLNGKKYYFDNDSKAVTGWRIINNEKYYFNPNNAIAAVGLQVIDNNKYYFNPDTAIISKGWQTVNGSRYYFDTDTAIAFNGYKTIDGKHFYFDSDCVVKIGVFSGSNGFEYFAPANTYNNNIEGQAIVYQSKFLTLNGKKYYFDNNSKAVTGWQTIDSKKYYFNTNTAEAATGWQTIDGKKYYFNTNTAEAATGWQTIDGKKYYFNTNTSIASTGYTIINGKYFYFNTDGIMQIGVFKVPNGFEYFAPANTHNNNIEGQAILYQNKFLTLNGKKYYFGSDSKAITGWQTIDGKKYYFNPNNAIAATHLCTINNDKYYFSYDGILQNGYITIERNNFYFDANNESKMVTGVFKGPNGFEYFAPANTHNNNIEGQAIVYQNKFLTLNGKKYYFDNDSKAVTGWQTIDSKKYYFNLNTAVAVTGWQTIDGEKYYFNLNTAEAATGWQTIDGKRYYFNTNTYIASTGYTIINGKHFYFNTDGIMQIGVFKGPDGFEYFAPANTHNNNIEGQAILYQNKFLTLNGKKYYFGSDSKAVTGLRTIDGKKYYFNTNTAVAVTGWQTINGKKYYFNTNTYIASTGYTIISGKHFYFNTDGIMQIGVFKGPDGFEYFAPANTDANNIEGQAIRYQNRFLYLHDNIYYFGNDSKAATGWATIDGNRYYFEPNTAMGANGYKTIDNKNFYFRNGLPQIGVFKGPNGFEYFAPANTDANNIDGQAIRYQNRFLHLLGKIYYFGNNSKAVTGWQTINSKVYYFMPDTAMAAAGGLFEIDGVIYFFGVDGVKAPGIYG

SEQ ID NO: 665 - protein, 2709 aa, synthetic construct
  REGION 1..2709: note = Synthetic amino acid sequence
SLISKEELIKLAYSIRPRENEYKTILTNLDEYNKLTTNNNENKYLQLKKLNESIDVFMNKYKTSSRNRALSNLKKDILKEVILIKNSNTSPVEKNLHFVWIGGEVSDIALEYIKQWADINAEYNIKLWYDSEAFLVNTLKKAIVESSTTEALQLLEEEIQNPQFDNMKFYKKRMEFIYDRQKRFINYYKSQINKPTVPTIDDIIKSHLVSEYNRDETVLESYRTNSLRKINSNHGIDIRANSLFTEQELLNIYSQELLNRGNLAAASDIVRLLALKNFGGVYLAVAMLPGIHSDLFKTISRPSSIGLDRWEMIKLEAIMKYKKYINNYTSENFDKLDQQLKDNFKLIIESKSEKSEIFSKLENLNVSDLEIKIAFALGSVINQALISKQGSYLTNLVIEQVKNRYQFLNQHLNPAIESDNNFTDTTKIFHDSLFNSATAENSMFLTKIAPYLQVGFMPEARSTISLSGPGAYASAYYDFINLQENTIEKTLKASDLIEFKFPENNLSQLTEQEINSLWSFDQASAKYQFEKYVRDYTGGSLSEDNGVDFNKNTALDKNYLLNNKIPSNNVEEAGSKNYVHYIIQLQGDDISYEATCNLFSKNPKNSIIIQRNMNESAKSYFLSDDGESILELNKYRIPERLKNKEKVKVTFIGHGKDEFNTSEFARLSVDSLSNEISSFLDTIKLDISPKNVEVNLLGANMFSYDFNVEETYPGKLLLSIMDKITSTLPDVNKNSITIGANQYEVRINSEGRKELLAHSGKWINKEEAIMSDLSSKEYIFFDSIDNKLKAKSKNIPGLASISEDIKTLLLDASVSPDTKFILNNLKLNIESSIGDYIYYEKLEPVKNIIHNSIDDLIDEFNLLENVSDELYELKKLNNLDEKYLISFEDISKNNSTYSVRFINKSNGESVYVETEKEIFSKYSEHITKEISTIKNSIITDVNGNLLDNIQLDHTSQVNTLNAAFFIQSLIDYSSNKDVLNDLSTSVKVQLYAQLFSTGLNTIYDSIQLVNLISNAVNDTINVLPTITEGIPIVSTILDGINLGAAIKELLDEHDPLLKKELEAKVGVLAINMSLSIAATVASIVGIGAEVTIFLLPIAGISAGIPSLVNNELILHDKATSVVNYFNHLSESKKYGPLKTEDDKILVPIDDLVISEIDFNNNSIKLGTCNILAMEGGSGHTVTGNIDHFFSSPSISSHIPSLSIYSAIGIETENLDFSKKIMMLPNAPSRVFWWETGAVPGLRSLENDGTRLLDSIRDLYPGKFYWRFYAFFDYAITTLKPVYEDTNIKIKLDKDTRNFIMPTITTNEIRNKLSYSFDGAGGTYSLLLSSYPISTNINLSKDDLWIFNIDNEVREISIENGTIKKGKLIKDVLSKIDINKNKLIIGNQTIDFSGDIDNKDRYIFLTCELDDKISLIIEINLVAKSYSLLLSGDKNYLISNLSNTIEKINTLGLDSKNIAYNYTDESNNKYFGAISKTSQKSIIHYKKDSKNILEFYNDSTLEFNSKDFIAEDINVFMKDDINTITGKYYVDNNTDKSIDFSISLVSKNQVKVNGLYLNESVYSSYLDFVKNSDGHHNTSNFMNLFLDNISFWKLFGFENINFVIDKYFTLVGKTNLGYVEFICDNNKNIDIYFGEWKTSSSKSTIFSGNGRNVVVEPIYNPDTGEDISTSLDFSYEPLYGIDRYINKVLIAPDLYTSLININTNYYSNEYYPEIIVLNPNTFHKKVNINLDSSSFEYKWSTEGSDFILVRYLEESNKKILQKIRIKGILSNTQSFNKMSIDFKDIKKLSLGYIMSNFKSFNSENELDRDHLGFKIIDNKTYYYDEDSKLVKGLININNSLFYFDPIEFNLVTGWQTINGKKYYFDINTGAALTSYKIINGKHFYFNNDGVMQLGVFKGPDGFEYFAPANTQNNNIEGQAIVYQSKFLTLNGKKYYFDNDSKAVTGWRIINNEKYYFNPNNAIAAVGLQVIDNNKYYFNPDTAIISKGWQTVNGSRYYFDTDTAIAFNGYKTIDGKHFYFDSDCVVKIGVFSTSNGFEYFAPANTYNNNIEGQAIVYQSKFLTLNGKKYYFDNNSKAVTGWQTIDSKKYYFNTNTAEAATGWQTIDGKKYYFNTNTAEAATGWQTIDGKKYYFNTNTAIASTGYTIINGKHFYFNTDGIMQIGVFKGPNGFEYFAPANTDANNIEGQAILYQNEFLTLNGKKYYFGSDSKAVTGWRIINNKKYYFNPNNAIAAIHLCTINNDKYYFSYDGILQNGYITIERNNFYFDANNESKMVTGVFKGPNGFEYFAPANTHNNNIEGQAIVYQNKFLTLNGKKYYFDNDSKAVTGWQTIDGKKYYFNLNTAEAATGWQTIDGKKYYFNLNTAEAATGWQTIDGKKYYFNTNTFIASTGYTSINGKHFYFNTDGIMQIGVFKGPNGFEYFAPANTHNNNIEGQAILYQNKFLTLNGKKYYFGSDSKAVTGLRTIDGKKYYFNTNTAVAVTGWQTINGKKYYFNTNTSIASTGYTIISGKHFYFNTDGIMQIGVFKGPDGFEYFAPANTDANNIEGQAIRYQNRFLYLHDNIYYFGNNSKAATGWVTIDGNRYYFEPNTAMGANGYKTIDNKNFYFRNGLPQIGVFKGSNGFEYFAPANTDANNIEGQAIRYQNRFLHLLGKIYYFGNNSKAVTGWQTINGKVYYFMPDTAMAAAGGLFEIDGVIYFFGVDGVKAPGIYG

SEQ ID NO: 666 - protein, 2709 aa, synthetic construct; identical to SEQ ID NO: 664
  REGION 1..2709: note = Synthetic amino acid sequence

SEQ ID NO: 667 - protein, 2709 aa, synthetic construct; identical to SEQ ID NO: 665
  REGION 1..2709: note = Synthetic amino acid sequence

SEQ ID NO: 668 - protein, 2709 aa, synthetic construct; identical to SEQ ID NO: 665
  REGION 1..2709: note = Synthetic amino acid sequence

SEQ ID NO: 669 - protein, 2709 aa, synthetic construct
  REGION 1..2709: note = Synthetic amino acid sequence
SLISKEELIKLAYSIRPRENEYKTILTNLDEYNKLTTNNNENKYLQLKKLNESIDVFMNKYKTSSRNRALSNLKKDILKEVILIKNSNTSPVEKNLHFVWIGGEVSDIALEYIKQWADINAEYNIKLWYDSEAFLVNTLKKAIVESSTTEALQLLEEEIQNPQFDNMKFYKKRMEFIYDRQKRFINYYKSQINKPTVPTIDDIIKSHLVSEYNRDETVLESYRTNSLRKINSNHGIDIRANSLFTEQELLNIYSQELLNRGNLAAASDIVRLLALKNFGGVYLAVAMLPGIHSDLFKTISRPSSIGLDRWEMIKLEAIMKYKKYINNYTSENFDKLDQQLKDNFKLIIESKSEKSEIFSKLENLNVSDLEIKIAFALGSVINQALISKQGSYLTNLVIEQVKNRYQFLNQHLNPAIESDNNFTDTTKIFHDSLFNSATAENSMFLTKIAPYLQVGFMPEARSTISLSGPGAYASAYYDFINLQENTIEKTLKASDLIEFKFPENNLSQLTEQEINSLWSFDQASAKYQFEKYVRDYTGGSLSEDNGVDFNKNTALDKNYLLNNKIPSNNVEEAGSKNYVHYIIQLQGDDISYEATCNLFSKNPKNSIIIQRNMNESAKSYFLSDDGESILELNKYRIPERLKNKEKVKVTFIGHGKDEFNTSEFARLSVDSLSNEISSFLDTIKLDISPKNVEVNLLGANMFSYDFNVEETYPGKLLLSIMDKITSTLPDVNKNSITIGANQYEVRINSEGRKELLAHSGKWINKEEAIMSDLSSKEYIFFDSIDNKLKAKSKNIPGLASISEDIKTLLLDASVSPDTKFILNNLKLNIESSIGDYIYYEKLEPVKNIIHNSIDDLIDEFNLLENVSDELYELKKLNNLDEKYLISFEDISKNNSTYSVRFINKSNGESVYVETEKEIFSKYSEHITKEISTIKNSIITDVNGNLLDNIQLDHTSQVNTLNAAFFIQSLIDYSSNKDVLNDLSTSVKVQLYAQLFSTGLNTIYDSIQLVNLISNAVNDTINVLPTITEGIPIVSTILDGINLGAAIKELLDEHDPLLKKELEAKVGVLAINMSLSIAATVASIVGIGAEVTIFLLPIAGISAGIPSLVNNELILHDKATSVVNYFNHLSESKKYGPLKTEDDKILVPIDDLVISEIDFNNNSIKLGTCNILAMEGGSGHTVTGNIDHFFSSPSISSHIPSLSIYSAIGIETENLDFSKKIMMLPNAPSRVFWWETGAVPGLRSLENDGTRLLDSIRDLYPGKFYWRFYAFFDYAITTLKPVYEDTNIKIKLDKDTRNFIMPTITTNEIRNKLSYSFDGAGGTYSLLLSSYPISTNINLSKDDLWIFNIDNEVREISIENGTIKKGKLIKDVLSKIDINKNKLIIGNQTIDFSGDIDNKDRYIFLTCELDDKISLIIEINLVAKSYSLLLSGDKNYLISNLSNTIEKINTLGLDSKNIAYNYTDESNNKYFGAISKTSQKSIIHYKKDSKNILEFYNDSTLEFNSKDFIAEDINVFMKDDVNTITGKYYVDNNTDKSIDFSISLVSKNQVKVNGLYLNESVYSSYLDFVKNSDGHHNTSNFMNLFLDNISFWKLFGFENINFVIDKYFTLVGKTNLGYVEFICDNNKNIDIYFGEWKTSSSKSTIFSGNGRNVVVEPIYNPDTGEDISTSLDFSYEPLYGIDRYINKVLIAPDLYTSLININTNYYSNEYYPEIIVLNPNTFHKKVNINLDSSSFEYKWSTEGSDFILVRYLEESNKKILQKIRIKGILSNTQSFNKMSIDFKDIKKLSLGYIMSNFKSFNSENELDRDHLGFKIIDNKTYYYDEDSKLVKGLININNSLFYFDPIEFNLVTGWQTINGKKYYFDINTGAALTSYKIINGKHFYFNNDGVMQLGVFKGPDGFEYFAPANTQNNNIEGQAIVYQSKFLTLNGKKYYFDNNSKAVTGWRIINNEKYYFNPNNAIAAVGLQVIDNNKYYFNPDTAIISKGWQTVNGSRYYFDTDTAIAFNGYKTIDGKHFYFDSDCVVKIGVFSTSNGFEYFAPANTYNNNIEGQAIVYQSKFLTLNGKKYYFDNNSKAVTGWQTIDSKKYYFNTNTAEAATGWQTIDGKKYYFNTNTAEAATGWQTIDGKKYYFNTNTAIASTGYTIINGKHFYFNTDGIMQIGVFKGPNGFEYFAPANTDANNIEGQAILYQNEFLTLNGKKYYFGSDSKAVTGWRIINNKKYYFNPNNAIAAIHLCTINNDKYYFSYDGILQNGYITIERNNFYFDANNESKMVTGVFKGPNGFEYFAPANTHNNNIEGQAIVYQNKFLTLNGKKYYFDNDSKAVTGWQTIDGKKYYFNLNTAEAATGWQTIDGKKYYFNLNTAEAATGWQTIDGKKYYFNTNTFIASTGYTSINGKHFYFNTDGIMQIGVFKGPNGFEYFAPANTDANNIEGQAILYQNKFLTLNGKKYYFGSDSKAVTGLRTIDGKKYYFNTNTAVAVTGWQTINGKKYYFNTNTSIASTGYTIISGKHFYFNTDGIMQIGVFKGPDGFEYFAPANTDANNIEGQAIRYQNRFLYLHDNIYYFGNNSKAATGWVTIDGNRYYFEPNTAMGANGYKTIDNKNFYFRNGLPQIGVFKGSNGFEYFAPANTDANNIEGQAIRYQNRFLHLLGKIYYFGNNSKAVTGWQTINGKVYYFMPDTAMAAAGGLFEIDGVIYFFGVDGVKAPGIYG

SEQ ID NO: 670 - protein, 2709 aa, synthetic construct
  REGION 1..2709: note = Synthetic amino acid sequence
SLISKEELIKLAYSIRPRENEYKTILTNLDEYNKLTTNNNENKYLQLKKLNESIDVFMNKYKNSSRNRALSNLKKDILKEVILIKNSNTSPVEKNLHFVWIGGEVSDIALEYIKQWADINAEYNIKLWYDSEAFLVNTLKKAIVESSTTEALQLLEEEIQNPQFDNMKFYKKRMEFIYDRQKRFVNYYKSQINKPTVPTIDDIIKSHLVSEYNRDETLLESYRTNSLRKINSNHGIDIRANSLFTEQELLNIYSQELLNRGNLAAASDIVRLLALKNFGGVYLAVAMLPGIHSDLFKTISRPSSIGLDRWEMIKLEAIMKYKKYINNYTSENFDKLDQQLKDNFKLIIESKSEKSEIFSKLENLNVSDLEIKIAFALGSVINQALISKQGSYLTNLVIEQVKNRYQFLNQHLNPAIESDNNFTDTTKIFHDSLFNSATAENSMFLTKIAPYLQVGFMPEARSTISLSGPGAYASAYYDFINLQENTIEKTLKASDLIEFKFPENNLSQLTEQEINSLWSFDQASAKYQFEKYVRDYTGGSLSEDNEVDFNKNTALDKNYLLNNKIPSNNVEEAGSKNYVHYIIQLQGDDISYEATCNLFSKNPKNSIIIQRNMNESAKSYFLSDDGESILELNKYRIPERLKNKEKVKVTFIGHGKDEFNTSEFARLSVDSLSNEISSFLDTIKLDISPKNVEVNLLGANMFSYDFNVEETYPGKLLLSIMDKITSTLPDVNKDSITIGANQYEVRINSEGRKELLAHSGKWINKEEAIMSDLSSKEYIFFDSIDNKLKAKSKNIPGLASISEDIKTLLLDTSVSPDTKFILNNLKLNIESSVGDYIYYEKLEPVKNIIHNSIDDLIDEFNLLENVSDELYELKKLNNLDEKYLISFEDISKNNSTYSVRFINKSNGESVYVETEKEIFSKYSEHITKEISTIKNSIITDVNGNLLDNIQLDHTSQVNTLNAAFFIQSLIDYSSNKDLLNDLSTSVKVQLYAQLFSTGLNTIYDSIQLVNLISNAVNDTINVLPTITEGIPIVSTILDGINLGAAIKELLDEHDPLLKKELEAKVGVLAINMSLSIAATVASIVGIGAEVTIFLLPIAGISAGIPSLVNNELILHDKATSVVNYFNHLSESKEYGPLKTEDDKILVPIDDLVISEIDFNNNAIKLGTCNILAMEGGSGHTVTGNIDHFFSSPSISSHIPSLSIYSAIGIKTENLDFSKKIMMLPNAPSRVFWWETGAVPGLRSLENNGTKLLDSIRDLYPGKFYWRFYAFFDYAITTLKPVYEDTNIKIKLDKDTRNFIMPTITTNEIRNKLSYSFDGAGGTYSLLLSSYPISTNINLSKDDLWIFNIDNEVREISIENGTIKKGKLIKDVLSKIDINKNKLIIGNQTIDFSGDIDNKDRYIFLTCELDDKISLIIEINLVAKSYSLLLSGDKNYLISNLSNTIEKINTLGLDSKNIAYNYTDESNNKYFGAISKTSQKSIIHYKKDSKNILEFYNGSTLEFNSKDFIAEDINVFMKDDINTITGKYYVDNNTDKSIDFSISLVSKNQAKVNGLYLNESVYSSYLDFVKNADGHHNTSNFMNLFLDNISFWKLFGFENINFVVDKYFTLVGKTNLGYVEFICDNNKNIDIYFGEWKTSSSKSTIFSGNGRNVVVEPIYNPDTGEDISTSLDFSYEPLYGIDRYINKVLIAPDLYTSLININTNYYSNEYYPEIIVLNPNTFHKKVNINLDSSSFEYKWSTEGSDFILVRYLEESNKKILQKIRIKGILSNTQSFNKMSIDFKDIKKLSLVYIMSNFKSFNSENELDRDHLGFKIIDNKTYYYDEASKLVKGLININNSLFYFDPIESNLVTGWQTINGKKYYFDINTGAALTSYKIINGKHFYFNNNGVMQLGVFKGPDRFEYFAPANTQNNNIEGQAIVYQSKFLTLNGKKYYFDNDSKAVTGWRIINNEKYYFNPNNAIAAVGLQVIDNNKYYFNPDTAIISKGWQTVNGSRYYFDTDTAIAFNGYKTIDGKHFYFDSDCVVKIGVFSGSNGFEYFAPANTYNNNIEGQAIVYQSKFLTLNGKKYYFDNNSKAVTGWQTIDSKKYYFNTNTAEAATGWQTIDGKKYYFNTNTAEVATGWQTIDGKKYYFNTNTSIASTGYTIINGKHFYFNTDGIMQIGVFKGPDGFEYFAPANTDANNIEGQAILYQNKFLTLNGKKYYFASDSKAVTGWRIINNKKYYFNPNNAIAATHLYTINNDKYYFSYDGILQNGYITIERNNFYFDANNESKMVTGVFKGPNGFEYFAPANTHNNNIEGQAIVYQNKFLTLNGKKYYFDNDSKAVTGWQTIDGKKYYFNLNTAVAVTGWQTIDGKKYYFNTNTAETATGWQTIDGKKYYFNTNTSIASTGYTIINGKHFYFNTDGIMQIGVFKGPDGFEYFAPANTDANNIEGQAILYQNKFLTLNGKKYYFASDSKAVTGLRTIDGKKYYFNTNTAEAATGWQTIDGKKYYFNTNTSIASTGYTIINDKHFYFNTDGIMQIGVFKGPDGFEYFAPANTDANNIEGQAIRYQNRFLYLHDNIYYFGNNSKAATGWVTIDGRRYYFEPNTAIGANGYKIIDNKNFYFRNGLPQIGVFKGPNGFEYFAPANTDANNIDGQAIRYQNRFLHLLGNIYYFGNNSKAVTGWQTINGNMYYFMPDTAMAAAGGLFEIDGVIYFFGVDGVKAPGIYG

SEQ ID NO: 671 - protein, 2709 aa, synthetic construct; identical to SEQ ID NO: 669
  REGION 1..2709: note = Synthetic amino acid sequence

SEQ ID NO: 672 - protein, 2709 aa, synthetic construct
  REGION 1..2709: note = Synthetic amino acid sequence
SLISKEELIKLAYSIRPRENEYKTILTNLDEYNKLTTNNNENKYLQLKKLNESIDVFMNKYKNSSRNRALSNLKKDILKEVILIKNSNTSPVEKNLHFVWIGGEVSDIALEYIKQWADINAEYNIKLWYDSEAFLVNTLKKAIVESSTTEALQLLEEEIQNPQFDNMKFYKKRMEFIYDRQKRFVNYYKSQINKPTVPTIDDIIKSHLVSEYNRDETLLESYRTNSLRKINSNHGIDIRANSLFTEQELLNIYSQELLNRGNLAAASDIVRLLALKNFGGVYLAVAMLPGIHSDLFKTISRPSSIGLDRWEMIKLEAIMKYKKYINNYTSENFDKLDQQLKDNFKLIIESKSEKSEIFSKLENLNVSDLEIKIAFALGSVINQALISKQGSYLTNLVIEQVKNRYQFLNQHLNPAIESDNNFTDTTKIFHDSLFNSATAENSMFLTKIAPYLQVGFMPEARSTISLSGPGAYASAYYDFINLQENTIEKTLKASDLIEFKFPENNLSQLTEQEINSLWSFDQASAKYQFEKYVRDYTGGSLSEDNEVDFNKNTALDKNYLLNNKIPSNNVEEAGSKNYVHYIIQLQGDDISYEATCNLFSKNPKNSIIIQRNMNESAKSYFLSDDGESILELNKYRIPERLKNKEKVKVTFIGHGKDEFNTSEFARLSVDSLSNEISSFLDTIKLDISPKNVEVNLLGANMFSYDFNVEETYPGKLLLSIMDKITSTLPDVNKDSITIGANQYEVRINSEGRKELLAHSGKWINKEEAIMSDLSSKEYIFFDSIDNKLKAKSKNIPGLASISEDIKTLLLDTSVSPDTKFILNNLKLNIESSVGDYIYYEKLEPVKNIIHNSIDDLIDEFNLLENVSDELYELKKLNNLDEKYLISFEDISKNNSTYSVRFINKSNGESVYVETEKEIFSKYSEHITKEISTIKNSIITDVNGNLLDNIQLDHTSQVNTLNAAFFIQSLIDYSSNKDLLNDLSTSVKVQLYAQLFSTGLNTIYDSIQLVNLISNAVNDTINVLPTITEGIPIVSTILDGINLGAAIKELLDEHDPLLKKELEAKVGVLAINMSLSIAATVASIVGIGAEVTIFLLPIAGISAGIPSLVNNELILHDKATSVVNYFNHLSESKEYGPLKTEDDKILVPIDDLVISEIDFNNNAIKLGTCNILAMEGGSGHTVTGNIDHFFSSPSISSHIPSLSIYSAIGIKTENLDFSKKIMMLPNAPSRVFWWETGAVPGLRSLENNGTKLLDSIRDLYPGKFYWRFYAFFDYAITTLKPVYEDTNIKIKLDKDTRNFIMPTITTNEIRNKLSYSFDGAGGTYSLLLSSYPISTNINLSKDDLWIFNIDNEVREISIENGTIKKGKLIKDVLSKIDINKNKLIIGNQTIDFSGDIDNKDRYIFLTCELDDKISLIIEINLVAKSYSLLLSGDKNYLISNLSNTIEKINTLGLDSKNIAYNYTDESNNKYFGAISKTSQKSIIHYKKDSKNILEFYNGSTLEFNSKDFIAEDINVFMKDDINTITGKYYVDNNTDKSIDFSISLVSKNQAKVNGLYLNESVYSSYLDFVKNADGHHNTSNFMNLFLDNISFWKLFGFENINFVVDKYFTLVGKTNLGYVEFICDNNKNIDIYFGEWKTSSSKSTIFSGNGRNVVVEPIYNPDTGEDISTSLDFSYEPLYGIDRYINKVLIAPDLYTSLININTNYYSNEYYPEIIVLNPNTFHKKVNINLDSSSFEYKWSTEGSDFILVRYLEESNKKILQKIRIKGILSNTQSFNKMSIDFKDIKKLSLVYIMSNFKSFNSENELDRDHLGFKIIDNKTYYYDEASKLVKGLININNSLFYFDPIESNLVTGWQTINGKKYYFDINTGAALTSYKIINGKHFYFNNNGVMQLGVFKGPDRFEYFAPANTQNNNIEGQAIVYQSKFLTLNGKKYYFDNDSKAVTGWRIINNEKYYFNPNNAIAAVGLQVIDNNKYYFNPDTAIISKGWQTVNGSRYYFDTDTAIAFNGYKTIDGKHFYFDSDCVVKIGVFSGSNGFEYFAPANTYNNNIEGQAIVYQSKFLTLNGKKYYFDNNSKAVTGWQTIDSKKYYFNTNTAEAATGWQTIDGKKYYFNTNTAEVATGWQTIDGKKYYFNTNTSIASTGYTIINGKHFYFNTDGIMQIGVFKGPDGFEYFAPANTDANNIEGQAILYQNKFLTLNGKKYYFASDSKAVTGWRIINNKKYYFNPNNAIAATHLYTINNDKYYFSYDGILQNGYITIERNNFYFDANNESKMVTGVFKGPNGFEYFAPANTHNNNIEGQAIVYQNKFLTLNGKKYYFDNDSKAVTGWQTIDGKKYYFNLNTAVAVTGWQTIDGKKYYFNTNTAEAATGWQTIDGKKYYFNTNTSIASTGYTIINGKHFYFNTDGIMQIGVFKGPDGFEYFAPANTDANNIEGQAILYQNKFLTLNGKKYYFASDSKAVTGLRTIDGKKYYFNTNTAEAATGWQTIDGKKYYFNTNTSIASTGYTIINDKHFYFNTDGIMQIGVFKGPDGFEYFAPANTDANNIEGQAIRYQNRFLYLHDNIYYFGNNSKAATGWVTIDGRRYYFEPNTAIGANGYKIIDNKNFYFRNGLPQIGVFKGPNGFEYFAPANTDANNIDGQAIRYQNRFLHLLGNIYYFGNNSKAVTGWQTINGNMYYFMPDTAMAAAGGLFEIDGVIYFFGVDGVKAPGIYG

SEQ ID NO: 673 - protein, 2709 aa, synthetic construct; identical to SEQ ID NO: 664
  REGION 1..2709: note = Synthetic amino acid sequence

SEQ ID NO: 674 - protein, 2709 aa, synthetic construct
  REGION 1..2709: note = Synthetic amino acid sequence
SLISKEELIKLAYSIRPRENEYKTILTNLDEYNKLTTNNNENKYLQLKKLNESIDVFMNKYKTSSRNRALSNLKKDILKEVILIKNSNTSPVEKNLHFVWIGGEVSDIALEYIKQWADINAEYNIKLWYDSEAFLVNTLKKAIVESSTTEALQLLEEEIQNPQFDNMKFYKKRMEFIYDRQKRFINYYKSQINKPTVPTIDDIIKSHLVSEYNRDETVLESYRTNSLRKINSNHGIDIRANSLFTEQELLNIYSQELLNRGNLAAASDIVRLLALKNFGGVYLAVAMLPGIHSDLFKTISRPSSIGLDRWEMIKLEAIMKYKKYINNYTSENFDKLDQQLKDNFKLIIESKSEKSEIFSKLENLNVSDLEIKIAFALGSVINQALISKQGSYLTNLVIEQVKNRYQFLNQHLNPAIESDNNFTDTTKIFHDSLFNSATAENSMFLTKIAPYLQVGFMPEARSTISLSGPGAYASAYYDFINLQENTIEKTLKASDLIEFKFPENNLSQLTEQEINSLWSFDQASAKYQFEKYVRDYTGGSLSEDNGVDFNKNTALDKNYLLNNKIPSNNVEEAGSKNYVHYIIQLQGDDISYEATCNLFSKNPKNSIIIQRNMNESAKSYFLSDDGESILELNKYRIPERLKNKEKVKVTFIGHGKDEFNTSEFARLSVDSLSNEISSFLDTIKLDISPKNVEVNLLGANMFSYDFNVEETYPGKLLLSIMDKITSTLPDVNKNSITIGANQYEVRINSEGRKELLAHSGKWINKEEAIMSDLSSKEYIFFDSIDNKLKAKSKNIPGLASISEDIKTLLLDASVSPDTKFILNNLKLNIESSIGDYIYYEKLEPVKNIIHNSIDDLIDEFNLLENVSDELYELKKLNNLDEKYLISFEDISKNNSTYSVRFINKSNGESVYVETEKEIFSKYSEHITKEISTIKNSIITDVNGNLLDNIQLDHTSQVNTLNAAFFIQSLIDYSSNKDVLNDLSTSVKVQLYAQLFSTGLNTIYDSIQLVNLISNAVNDTINVLPTITEGIPIVSTILDGINLGAAIKELLDEHDPLLKKELEAKVGVLAINMSLSIAATVASIVGIGAEVTIFLLPIAGISAGIPSLVNNELILHDKATSVVNYFNHLSESKKYGPLKTEDDKILVPIDDLVISEIDFNNNSIKLGTCNILAMEGGSGHTVTGNIDHFFSSPSISSHIPSLSIYSAIGIETENLDFSKKIMMLPNAPSRVFWWETGAVPGLRSLENNGTKLLDSIRDLYPGKFYWRFYAFFDYAITTLKPVYEDTNIKIKLDKDTRNFIMPTITTNEIRNKLSYSFDGAGGTYSLLLSSYPISTNINLSKDDLWIFNIDNEVREISIENGTIKKGKLIKDVLSKIDINKNKLIIGNQTIDFSGDIDNKDRYIFLTCELDDKISLIIEINLVAKSYSLLLSGDKNYLISNLSNTIEKINTLGLDSKNIAYNYTDESNNKYFGAISKTSQKSIIHYKKDSKNILEFYNGSTLEFNSKDFIAEDINVFMKDDINTITGKYYVDNNTDKSIDFSISLVSKNQVKVNGLYLNESVYSSYLDFVKNSDGHHNTSNFMNLFLDNISFWKLFGFENINFVIDKYFTLVGKTNLGYVEFICDNNKNIDIYFGEWKTSSSKSTIFSGNGRNVVVEPIYNPDTGEDISTSLDFSYEPLYGIDRYINKVLIAPDLYTSLININTNYYSNEYYPEIIVLNPNTFHKKVNINLDSSSFEYKWSTEGSDFILVRYLEESNKKILQKIRIKGILSNTQSFNKMSIDFKDIKKLSLGYIMSNFKSFNSENELDRDHLGFKIIDNKTYYYDEDSKLVKGLININNSLFYFDPIEFNLVTGWQTINGKKYYFDINTGAALTSYKIINGKHFYFNNDGVMQLGVFKGPDGFEYFAPANTQNNNIEGQAIVYQSKFLTLNGKKYYFDNDSKAVTGWRIINNEKYYFNPNNAIAAVGLQVIDNNKYYFNPDTAIISKGWQTVNGSRYYFDTDTAIAFNGYKTIDGKHFYFDSDCVVKIGVFSTSNGFEYFAPANTYNNNIEGQAIVYQSKFLTLNGKKYYFDDNSKAVTGWQTIDSKKYYFNTNTAEAATGWQTIDGKKYYFNTNTAEAATGWQTIDGKKYYFNTNTAIASTGYTIINGKHFYFNTDGIMQIGVFKGPNGFEYFAPANTDANNIEGQAILYQNEFLTLNGKKYYFGSDSKAVTGWRIINNKKYYFNPNNAIAAIHLCTINNDKYYFSYDGILQNGYITIERNNFYFDANNESKMVTGVFKGPNGFEYFAPANTYNNNIEGQAIVYQNKFLTLNGKKYYFDNDSKAVTGWQTIDGKKYYFNLNTAEAATGWQTIDGKKYYFNLNTAEAATGWQTIDGKKYYFNTNTFIASTGYTSINGKHFYFNTDGIMQIGVFKGPNGFEYFAPANTHNNNIEGQAILYQNKFLTLNGKKYYFGSDSKAVTGLRTIDGKKYYFNTNTAVAVTGWQTINGKKYYFNTNTSIASTGYTIISGKHFYFNTDGIMQIGVFKGPDGFEYFAPANTDANNIEGQAIRYQNRFLYLHDNIYYFGNNSKAATGWVTIDGNRYYFEPNTAMGANGYKTIDNKNFYFRNGLPQIGVFKGSNGFEYFAPANTDANNIEGQAIRYQNRFLHLLGKIYYFGNNSKAVTGWQTINGKVYYFMPDTAMAAAGGLFEIDGVIYFFGVDGVKAPGIYG

SEQ ID NO: 675 - protein, 2709 aa, synthetic construct
  REGION 1..2709: note = Synthetic amino acid sequence
SLISKEELIKLAYSIRPRENEYKTILTNLDEYNKLTTNNNENKYLQLKKLNESIDVFMNKYKTSSRNRALSNLKKDILKEVILIKNSNTSPVEKNLHFVWIGGEVSDIALEYIKQWADINAEYNIKLWYDSEAFLVNTLKKAIVESSTTEALQLLEEEIQNPQFDNMKFYKKRMEFIYDRQKRFINYYKSQINKPTVPTIDDIIKSHLVSEYNRDETVLESYRTNSLRKINSNHGIDIRANSLFTEQELLNIYSQELLNRGNLAAASDIVRLLALKNFGGVYLAVAMLPGIHSDLFKTISRPSSIGLDRWEMIKLEAIMKYKKYINNYTSENFDKLDQQLKDNFKLIIESKSEKSEIFSKLENLNVSDLEIKIAFALGSVINQALISKQGSYLTNLVIEQVKNRYQFLNQHLNPAIESDNNFTDTTKIFHDSLFNSATAENSMFLTKIAPYLQVGFMPEARSTISLSGPGAYASAYYDFINLQENTIEKTLKASDLIEFKFPENNLSQLTEQEINSLWSFDQASAKYQFEKYVRDYTGGSLSEDNGVDFNKNTALDKNYLLNNKIPSNNVEEAGSKNYVHYIIQLQGDDISYEATCNLFSKNPKNSIIIQRNMNESAKSYFLSDDGESILELNKYRIPERLKNKEKVKVTFIGHGKDEFNTSEFARLSVDSLSNEISSFLDTIKLDISPKNVEVNLLGANMFSYDFNVEETYPGKLLLSIMDKITSTLPDVNKNSITIGANQYEVRINSEGRKELLAHSGKWINKEEAIMSDLSSKEYIFFDSIDNKLKAKSKNIPGLASISEDIKTLLLDASVSPDTKFILNNLKLNIESSIGDYIYYEKLEPVKNIIHNSIDDLIDEFNLLENVSDELYELKKLNNLDEKYLISFEDISKNNSTYSVRFINKSNGESVYVETEKEIFSKYSEHITKEISTIKNSIITDVNGNLLDNIQLDHTSQVNTLNAAFFIQSLIDYSSNKDVLNDLSTSVKVQLYAQLFSTGLNTIYDSIQLVNLISNAVNDTINVLPTITEGIPIVSTILDGINLGAAIKELLDEHDPLLKKELEAKVGVLAINMSLSIAATVASIVGIGAEVTIFLLPIAGISAGIPSLVNNELILHDKATSVVNYFNHLSESKKYGPLKTEDDKILVPIDDLVISEIDFNNNSIKLGTCNILAMEGGSGHTVTGNIDHFFSSPSISSHIPSLSIYSAIGIETENLDFSKKIMMLPNAPSRVFWWETGAVPGLRSLENDGTRLLDSIRDLYPGKFYWRFYAFFDYAITTLKPVYEDTNIKIKLDKDTRNFIMPTITTNEIRNKLSYSFDGAGGTYSLLLSSYPISTNINLSKDDLWIFNIDNEVREISIENGTIKKGKLIKDVLSKIDINKNKLIIGNQTIDFSGDIDNKDRYIFLTCELDDKISLIIEINLVAKSYSLLLSGDKNYLISNLSNTIEKINTLGLDSKNIAYNYTDESNNKYFGAISKTSQKSIIHYKKDSKNILEFYNDSTLEFNSKDFIAEDINVFMKDDINTITGKYYVDNNTDKSIDFSISLVSKNQVKVNGLYLNESVYSSYLDFVKNSDGHHNTSNFMNLFLDNISFWKLFGFENINFVIDKYFTLVGKTNLGYVEFICDNNKNIDIYFGEWKTSSSKSTIFSGNGRNVVVEPIYNPDTGEDISTSLDFSYEPLYGIDRYINKVLIAPDLYTSLININTNYYSNEYYPEIIVLNPNTFHKKVNINLDSSSFEYKWSTEGSDFILVRYLEESNKKILQKIRIKGILSNTQSFNKMSIDFKDIKKLSLGYIMSNFKSFNSENELDRDHLGFKIIDNKTYYYDEDSKLVKGLININNSLFYFDPIEFNLVTGWQTINGKKYYFDINTGAALTSYKIINGKHFYFNNDGVMQLGVFKGPDGFEYFAPANTQNNNIEGQAIVYQSKFLTLNGKKYYFDNNSKAVTGWRIINNEKYYFNPNNAIAAVGLQVIDNNKYYFNPDTAIISKGWQTVNGSRYYFDTDTAIAFNGYKTIDGKHFYFDSDCVVKIGVFSTSNGFEYFAPANTYNNNIEGQAIVYQSKFLTLNGKKYYFDNNSKAVTGWQTIDSKKYYFNTNTAEAATGWQTIDGKKYYFNTNTAEAATGWQTIDGKKYYFNTNTAIASTGYTIINGKHFYFNTDGIMQIGVFKGPNGFEYFAPANTDANNIEGQAILYQNEFLTLNGKKYYFGSDSKAVTGWRIINNKKYYFNPNNAIAAIHLCTINNDKYYFSYDGILQNGYITIERNNFYFDANNESKMVTGVFKGPNGFEYFAPANTHNNNIEGQAIVYQNKFLTLNGKKYYFDNDSKAVTGWQTIDGKKYYFNLNTAEAATGWQTIDGKKYYFNLNTAEAATGWQTIDGKKYYFNTNTFIASTGYTSINGKHFYFNTDGIMQIGVFKGPNGFEYFAPANTHNNNIEGQAILYQNKFLTLNGKKYYFGSDSKAVTGLRTIDGKKYYFNTNTAVAVTGWQTINGKKYYFNTNTSIASTGYTIISGKHFYFNTDGIMQIGVFKGPDGFEYFAPANTDANNIEGQAIRYQNRFLYLHDNIYYFGNNSKAATGWVTIDGNRYYFEPNTAMGANGYKTIDNKNFYFRNGLPQIGVFKGSNGFEYFAPANTDANNIEGQAIRYQNRFLHLLGKIYYFGNNSKAVTGWQTINGKVYYFMPDTAMAAAGGLFEIDGVIYFFGVDGVKAPGIYG

SEQ ID NO: 676 - protein, 2709 aa, synthetic construct; identical to SEQ ID NO: 672
  REGION 1..2709: note = Synthetic amino acid sequence

SEQ ID NO: 677 - protein, 2709 aa, synthetic construct
  REGION 1..2709: note = Synthetic amino acid sequence
SLISKEELIKLAYSIRPRENEYKTILTNLDEYNKLTTNNNENKYLQLKKLNESIDVFMNKYKTSSRNRALSNLKKDILKEVILIKNSNTSPVEKNLHFVWIGGEVSDIALEYIKQWADINAEYNIKLWYDSEAFLVNTLKKAIVESSTTEALQLLEEEIQNPQFDNMKFYKKRMEFIYDRQKRFINYYKSQINKPTVPTIDDIIKSHLVSEYNRDETVLESYRTNSLRKINSNHGIDIRANSLFTEQELLNIYSQELLNRGNLAAASDIVRLLALKNFGGVYLAVAMLPGIHSDLFKTISRPSSIGLDRWEMIKLEAIMKYKKYINNYTSENFDKLDQQLKDNFKLIIESKSEKSEIFSKLENLNVSDLEIKIAFALGSVINQALISKQGSYLTNLVIEQVKNRYQFLNQHLNPAIESDNNFTDTTKIFHDSLFNSATAENSMFLTKIAPYLQVGFMPEARSTISLSGPGAYASAYYDFINLQENTIEKTLKASDLIEFKFPENNLSQLTEQEINSLWSFDQASAKYQFEKYVRDYTGGSLSEDNGVDFNKNTALDKNYLLNNKIPSNNVEEAGSKNYVHYIIQLQGDDISYEATCNLFSKNPKNSIIIQRNMNESAKSYFLSDDGESILELNKYRIPERLKNKEKVKVTFIGHGKDEFNTSEFARLSVDSLSNEISSFLDTIKLDISPKNVEVNLLGANMFSYDFNVEETYPGKLLLSIMDKITSTLPDVNKNSITIGANQYEVRINSEGRKELLAHSGKWINKEEAIMSDLSSKEYIFFDSIDNKLKAKSKNIPGLASISEDIKTLLLDASVSPDTKFILNNLKLNIESSIGDYIYYEKLEPVKNIIHNSIDDLIDEFNLLENVSDELYELKKLNNLDEKYLISFEDISKNNSTYSVRFINKSNGESVYVETEKEIFSKYSEHITKEISTIKNSIITDVNGNLLDNIQLDHTSQVNTLNAAFFIQSLIDYSSNKDVLNDLSTSVKVQLYAQLFSTGLNTIYDSIQLVNLISNAVNDTINVLPTITEGIPIVSTILDGINLGAAIKELLDEHDPLLKKELEAKVGVLAINMSLSIAATVASIVGIGAEVTIFLLPIAGISAGIPSLVNNELILHDKATSVVNYFNHLSESKKYGPLKTEDDKILVPIDDLVISEIDFNNNSIKLGTCNILAMEGGSGHTVTGNIDHFFSSPSISSHIPSLSIYSAIGIETENLDFSKKIMMLPNAPSRVFWWETGAVPGLRSLENDGTRLLDSIRDLYPGKFYWRFYAFFDYAITTLKPVYEDTNIKIKLDKDTRNFIMPTITTNEIRNKLSYSFDGAGGTYSLLLSSYPISTNINLSKDDLWIFNIDNEVREISIENGTIKKGKLIKDVLSKIDINKNKLIIGNQTIDFSGDIDNKDRYIFLTCELDDKISLIIEINLVAKSYSLLLSGDKNYLISNLSNTIEKINTLGLDSKNIAYNYTDESNNKYFGAISKTSQKSIIHYKKDSKNILEFYNDSTLEFNSKDFIAEDINVFMKDDINTITGKYYVDNNTDKSIDFSISLVSKNQVKVNGLYLNESVYSSYLDFVKNSDGHHNTSNFMNLFLDNISFWKLFGFENINFVIDKYFTLVGKTNLGYVEFICDNNKNIDIYFGEWKTSSSKSTIFSGNGRNVVVEPIYNPDTGEDISTSLDFSYEPLYGIDRYINKVLIAPDLYTSLININTNYYSNEYYPEIIVLNPNTFHKKVNINLDSSSFEYKWSTEGSDFILVRYLEESNKKILQKIRIKGILSNTQSFNKMSIDFKDIKKLSLGYIMSNFKSFNSENELDRDHLGFKIIDNKTYYYDEDSKLVKGLININNSLFYFDPIEFNLVTGWQTINGKKYYFDINTGAALTSYKIINGKHFYFNNDGVMQLGVFKGPDGFEYFAPANTQNNNIEGQAIVYQSKFLTLNGKKYYFDNDSKAVTGWRIINNEKYYFNPNNAIAAVGLQVIDNNKYYFNPDTAIISKGWQTVNGSRYYFDTDTAIAFNGYKTIDGKHFYFDSDCVVKIGVFSTSNGFEYFAPANTYNNNIEGQAIVYQSKFLTLNGKKYYFDNNSKAVTGWQTIDSKKYYFNTNTAEAATGWQTIDGKKYYFNTNTAEAATGWQTIDGKKYYFNTNTAIASTGYTIINGKHFYFNTDGIMKIGVFKGPNGFEYFAPANTDANNIEGQAILYQNEFLTLNGKKYYFGSDSKAVTGWRIINNKKYYFNPNNAIAAIHLCTINNDKYYFSYDGILQNGYITIERNNFYFDANNESKMVTGVFKGPNGFEYFAPANTYNNNIEGQAIVYQNKFLTLNGKKYYFDNDSKAVTGWQTIDGKKYYFNLNTAEAATGWQTIDGKKYYFNLNTAEAATGWQTIDGKKYYFNTNTFIASTGYTSINGKHFYFNTDGIMQIGVFKGPNGFEYFAPANTHNNNIEGQAILYQNKFLTLNGKKYYFGSDSKAVTGLRTIDGKKYYFNTNTAVAVTGWQTINGKKYYFNTNTSIASTGYTIISGKHFYFNTDGIMQIGVFKGPDGFEYFAPANTDANNIEGQAIRYQNRFLYLHDNIYYFGNNSKAATGWVTIDGNRYYFEPNTAMGANGYKTIDNKNFYFRNGLPQIGVFKGSNGFEYFAPANTDANNIEGQAIRYQNRFLHLLGKIYYFGNNSKAVTGWQTINGKVYYFMPDTAMAAAGGLFEIDGVIYFFGVDGVKAPGIYG

SEQ ID NO: 678 - protein, 2709 aa, synthetic construct; identical to SEQ ID NO: 672
  REGION 1..2709: note = Synthetic amino acid sequence

SEQ ID NO: 679 - protein, 2709 aa, synthetic construct
  REGION 1..2709: note = Synthetic amino acid sequence
SLISKEELIKLAYSIRPRENEYKTILTNLDEYNKLTTNNNENKYLQLKKLNESIDVFMNKYKNSSRNRALSNLKKDILKEVILIKNSNTSPVEKNLHFVWIGGEVSDIALEYIKQWADINAEYNIKLWYDSEAFLVNTLKKAIVESSTTEALQLLEEEIQNPQFDNTKFYKKRMEFIYDRQKRFINYYKSQINKPTVPTIDDIIKSHLVSEYNRDETLLESYRTNSLRKINSNHGIDIRANSLFTEQELLNIYSQELLNRGNLAAASDIVRLLALKNFGGVYLAVAMLPGIHSDLFKTISRPSSIGLDRWEMIKLEAIMKYKKYINNYTSENFDKLDQQLKDNFKLIIESKSEKSEIFSKLENLNVSDLEIKIAFALGSVINQALISKQGSYLTNLVIEQVKNRYQFLNQHLNPAIESDNNFTDTTKIFHDSLFNSATAENSMFLTKIAPYLQVGFMPEARSTISLSGPGAYASAYYDFINLQENTIEKTLKASDLIEFKFPENNLSQLTEQEINSLWSFDQASAKYQFEKYVRDYTGGSLSEDNGVDFNKNTALDKNYLLNNKIPSNNVEEAGSKNYVHYIIQLQGDDISYEATCNLFSKNPKNSIIIQRNMNESAKSYFLSDDGESILELNKYRIPERLKNKEKVKVTFIGHGKDEFNTSEFARLSVDSLSNEISSFLDTIKLDISPKNVEVNLLGANMFSYDFNVEETYPGKLLLSIMDKITSTLPDVNKDSITIGANQYEVRINSEGRKELLAHSGKWINKEEAIMSDLSSKEYIFFDSIDNKLKAKSKNIPGLASISEDIKTLLLDASVSPDTKFILNNLKLNIESSIGDYIYYEKLEPVKNIIHNSIDDLIDEFNLLENVSDELYELKKLNNLDEKYLISFEDISKNNSTYSVRFINKSNGESVYVETEKEIFSKYSEHITKEISTIKNSIITDVNGNLLDNIQLDHTSQVNTLNAAFFIQSLIDYSSNKDVLNDLSTSVKVQLYAQLFSTGLNTIYDSIQLVNLISNAVNDTINVLPTITEGIPIVSTILDGINLGAAIKELLDEHDPLLKKELEAKVGVLAINMSLSIAATVASIVGIGAEVTIFLLPIAGISAGIPSLVNNELILHDKATSVVNYFNHLSESKKYGPLKTEDDKILVPIDDLVISEIDFNNNSIKLGTCNILAMEGGSGHTVTGNIDHFFSSPYISSHIPSLSVYSAIGIKTENLDFSKKIMMLPNAPSRVFWWETGAVPGLRSLENDGTKLLDSIRDLYPGKFYWRFYAFFDYAITTLKPVYEDTNTKIKLDKDTRNFIMPTITTDEIRNKLSYSFDGAGGTYSLLLSSYPISMNINLSKDDLWIFNIDNEVREISIENGTIKKGNLIEDVLSKIDINKNKLIIGNQTIDFSGDIDNKDRYIFLTCELDDKISLIIEINLVAKSYSLLLSGDKNYLISNLSNTIEKINTLGLDSKNIAYNYTDESNNKYFGAISKTSQKSIIHYKKDSKNILEFYNGSTLEFNSKDFIAEDINVFMKDDINTITGKYYVDNNTDKSIDFSISLVSKNQVKVNGLYLNESVYSSYLDFVKNSDGHHNTSNFMNLFLNNISFWKLFGFENINFVIDKYFTLVGKTNLGYVEFICDNNKNIDIYFGEWKTLSSKSTIFSGNGRNVVVEPIYNPDTGEDISTSLDFSYEPLYGIDRYINKVLIAPDLYTSLININTNYYSNEYYPEIIVLNPNTFHKKVNINLDSSSFEYKWSTEGSDFILVRYLEESNKKILQKIRIKGILSNTQSFNKMSIDFKDIKKLSLGYIMSNFKSFNSENELDRDHLGFKIIDNKTYYYDEDSKLVKGLININNSLFYFDPIESNLVTGWQTINGKKYYFDINTGAASTSYKIINGKHFYFNNNGVMQLGVFKGPDGFEYFAPANTQNNNIEGQAIVYQSKFLTLNGKKYYFDNDSKAVTGWRIINNEKYYFNPNNAIAAVGLQVIDNNKYYFNPDTAIISKGWQTVNGSRYYFDTDTAIAFNGYKTIDGKHFYFDSDCVVKIGVFSGSNGFEYFAPANTYNNNIEGQAIVYQSKFLTLNGKKYYFDNNSKAVTGWQTIDSKKYYFNTNTAEAATGWQTIDGKKYYFNTNTAEAATGWQTIDGKKYYFNTNTSIASTGYTIINGKHFYFNTDGIMQIGVFKGPNGFEYFAPANTDANNIEGQAILYQNKFLTLNGKKYYFGSDSKAITGWQTIDGKKYYFNPNNAIAATHLCTINNDKYYFSYDGILQNGYITIERNNFYFDANNESKMVTGVFKGPNGFEYFAPANTHNNNIEGQAIVYQNKFLTLNGKKYYFDNDSKAVTGWQTIDSKKYYFNLNTAVAVTGWQTIDGEKYYFNLNTAEAATGWQTIDGKRYYFNTNTYIASTGYTIINGKHFYFNTDGIMQIGVFKGPDGFEYFAPANTHNNNIEGQAILYQNKFLTLNGKKYYFGSDSKAVTGLRTIDGKKYYFNTNTAVAVTGWQTINGKKYYFNTNTYIASTGYTIISGKHFYFNTDGIMQIGVFKGPDGFEYFAPANTDANNIEGQAIRYQNRFLYLHDNIYYFGNDSKAATGWATIDGNRYYFEPNTAMGANGYKTIDNKNFYFRNGLPQIGVFKGPNGFEYFAPANTDANNIDGQAIRYQNRFLHLLGNIYYFGNNSKAVTGWQTINGKVYYFMPDTAMAAAGGLFEIDGVIYFFGVDGVKAPGIYG

SEQ ID NO: 680 - protein, 2709 aa, synthetic construct; identical to SEQ ID NO: 679
  REGION 1..2709: note = Synthetic amino acid sequence

SEQ ID NO: 681 - protein, 2709 aa, synthetic construct; identical to SEQ ID NO: 679
  REGION 1..2709: note = Synthetic amino acid sequence

SEQ ID NO: 682 - protein, 2709 aa, synthetic construct; identical to SEQ ID NO: 665
  REGION 1..2709: note = Synthetic amino acid sequence

SEQ ID NO: 683 - protein, 2709 aa, synthetic construct; identical to SEQ ID NO: 669
  REGION 1..2709: note = Synthetic amino acid sequence

SEQ ID NO: 684 - protein, 2709 aa, synthetic construct
  REGION 1..2709: note = Synthetic amino acid sequence
SLISKEELIKLAYSIRPRENEYKTILTNLDEYNKLTTNNNENKYLQLKKLNESIDVFMNKYKTSSRNRALSNLKKDILKEVILIKNSNTSPVEKNLHFVWIGGEVSDIALEYIKQWADINAEYNIKLWYDSEAFLVNTLKKAIVESSTTEALQLLEEEIQNPQFDNMKFYKKRMEFIYDRQKRFINYYKSQINKPTVPTIDDIIKSHLVSEYNRDETVLESYRTNSLRKINSNHGIDIRANSLFTEQELLNIYSQELLNRGNLAAASDIVRLLALKNFGGVYLAVAMLPGIHSDLFKTISRPSSIGLDRWEMIKLEAIMKYKKYINNYTSENFDKLDQQLKDNFKLIIESKSEKSEIFSKLENLNVSDLEIKIAFALGSVINQALISKQGSYLTNLVIEQVKNRYQFLNQHLNPAIESDNNFTDTTKIFHDSLFNSATAENSMFLTKIAPYLQVGFMPEARSTISLSGPGAYASAYYDFINLQENTIEKTLKASDLIEFKFPENNLSQLTEQEINSLWSFDQASAKYQFEKYVRDYTGGSLSEDNGVDFNKNTALDKNYLLNNKIPSNNVEEAGSKNYVHYIIQLQGDDISYEATCNLFSKNPKNSIIIQRNMNESAKSYFLSDDGESILELNKYRIPERLKNKEKVKVTFIGHGKDEFNTSEFARLSVDSLSNEISSFLDTIKLDISPKNVEVNLLGANMFSYDFNVEETYPGKLLLSIMDKITSTLPDVNKNSITIGANQYEVRINSEGRKELLAHSGKWINKEEAIMSDLSSKEYIFFDSIDNKLKAKSKNIPGLASISEDIKTLLLDASVSPDTKFILNNLKLNIESSIGDYIYYEKLEPVKNIIHNSIDDLIDEFNLLENVSDELYELKKLNNLDEKYLISFEDISKNNSTYSVRFINKSNGESVYVETEKEIFSKYSEHITKEISTIKNSIITDVNGNLLDNIQLDHTSQVNTLNAAFFIQSLIDYSSNKDVLNDLSTSVKVQLYAQLFSTGLNTIYDSIQLVNLISNAVNDTINVLPTITEGIPIVSTILDGINLGAAIKELLDEHDPLLKKELEAKVGVLAINMSLSIAATVASIVGIGAEVTIFLLPIAGISAGIPSLVNNELILHDKATSVVNYFNHLSESKKYGPLKTEDDKILVPIDDLVISEIDFNNNSIKLGTCNILAMEGGSGHTVTGNIDHFFSSPSISSHIPSLSIYSAIGIETENLDFSKKIMMLPNAPSRVFWWETGAVPGLRSLENDGTRLLDSIRDLYPGKFYWRFYAFFDYAITTLKPVYEDTNIKIKLDKDTRNFIMPTITTNEIRNKLSYSFDGAGGTYSLLLSSYPISTNINLSKDDLWIFNIDNEVREISIENGTIKKGKLIKDVLSKIDINKNKLIIGNQTIDFSGDIDNKDRYIFLTCELDDKISLIIEINLVAKSYSLLLSGDKNYLISNLSNTIEKINTLGLDSKNIAYNYTDESNNKYFGAISKTSQKSIIHYKKDSKNILEFYNDSTLEFNSKDFIAEDINVFMKDDINTITGKYYVDNNTDKSIDFSISLVSKNQVKVNGLYLNESVYSSYLDFVKNSDGHHNTSNFMNLFLDNISFWKLFGFENINFVIDKYFTLVGKTNLGYVEFICDNNKNIDIYFGEWKTSSSKSTIFSGNGRNVVVEPIYNPDTGEDISTSLDFSYEPLYGIDRYINKVLIAPDLYTSLININTNYYSNEYYPEIIVLNPNTFHKKVNINLDSSSFEYKWSTEGSDFILVRYLEESNKKILQKIRIKGILSNTQSFNKMSIDFKDIKKLSLGYIMSNFKSFNSENELDRDHLGFKIIDNKTYYYDEDSKLVKGLININNSLFYFDPIEFNLVTGWQTINGKKYYFDINTGAALTSYKIINGKHFYFNNDGVMQLGVFKGPDGFEYFAPANTQNNNIEGQAIVYQSKFLTLNGKKYYFDNDSKAVTGWRIINNEKYYFNPNNAIAAVGLQVIDNNKYYFNPDTAIISKGWQTVNGSRYYFDTDTAIAFNGYKTIDGKHFYFDSDCVVKIGVFSTSNGFEYFAPANTYNNNIEGQAIVYQSKFLTLNGKKYYFDNNSKAVTGWQTIDSKKYYFNTNTAEAATGWQTIDGKKYYFNTNTAEAATGWQTIDGKKYYFNTNTAIASTGYTIINGKHFYFNTDGIMQIGVFKGPNGFEYFAPANTDANNIEGQAILYQNEFLTLNGKKYYFGSDSKAVTGWRIINNKKYYFNPNNAIAAIHLCTINNDKYYFSYDGILQNGYITIERNNFYFDANNESKMVTGVFKGPNGFEYFAPANTHNNNIEGQAIVYQNKFLTLNGKKYYFDNDSKAVTGWQTIDGKKYYFNLNTAEAATGWQTIDGKKYYFNLNTAEAATGWQTIDGKKYYFNTNTFIASTGYTSINGKHFYFNTDGIMQIGVFKGPNGFEYFAPANTDANNIEGQAILYQNKFLTLNGKKYYFGSDSKAVTGLRTIDGKKYYFNTNTAVAVTGWQTINGKKYYFNTNTSIASTGYTIISGKHFYFNTDGIMQIGVFKGPDGFEYFAPANTDANNIEGQAIRYQNRFLYLHDNIYYFGNNSKAATGWVTIDGNRYYFEPNTAMGANGYKTIDNKNFYFRNGLPQIGVFKGSNGFEYFAPANTDANNIEGQAIRYQNRFLHLLGKIYYFGNNSKAVTGWQTINGKVYYFMPDTAMAAAGGLFEIDGVIYFFGVDGVKAPGIYG

SEQ ID NO: 685 - protein, 2709 aa, synthetic construct; identical to SEQ ID NO: 665
  REGION 1..2709: note = Synthetic amino acid sequence

SEQ ID NO: 686 - protein, 2709 aa, synthetic construct; identical to SEQ ID NO: 664
  REGION 1..2709: note = Synthetic amino acid sequence

SEQ ID NO: 687 - protein, 2709 aa, synthetic construct; identical to SEQ ID NO: 665
  REGION 1..2709: note = Synthetic amino acid sequence

SEQ ID NO: 688 - protein, 2709 aa, synthetic construct; identical to SEQ ID NO: 665
  REGION 1..2709: note = Synthetic amino acid sequence

SEQ ID NO: 689 - protein, 2709 aa, synthetic construct
  REGION 1..2709: note = Synthetic amino acid sequence
SLISKEELIKLAYSIRPRENEYKTILTNLDEYNKLTTNNNENKYLQLKKLNESIDVFMNKYKTSSRNRALSNLKKDILKEVILIKNSNTSPVEKNLHFVWIGGEVSDIALEYIKQWADINAEYNIKLWYDSEAFLVNTLKKAIVESSTTEALQLLEEEIQNPQFDNMKFYKKRMEFIYDRQKRFINYYKSQINKPTVPTIDDIIKSHLVSEYNRDETVLESYRTNSLRKINSNHGIDIRANSLFTEQELLNIYSQELLNRGNLAAASDIVRLLALKNFGGVYLAVAMLPGIHSDLFKTISRPSSIGLDRWEMIKLEAIMKYKKYINNYTSENFDKLDQQLKDNFKLIIESKSEKSEIFSKLENLNVSDLEIKIAFALGSVINQALISKQGSYLTNLVIEQVKNRYQFLNQHLNPAIESDNNFTDTTKIFHDSLFNSATAENSMFLTKIAPYLQVGFMPEARSTISLSGPGAYASAYYDFINLQENTIEKTLKASDLIEFKFPENNLSQLTEQEINSLWSFDQASAKYQFEKYVRDYTGGSLSEDNGVDFNKNTALDKNYLLNNKIPSNNVEEAGSKNYVHYIIQLQGDDISYEATCNLFSKNPKNSIIIQRNMNESAKSYFLSDDGESILELNKYRIPERLKNKEKVKVTFIGHGKDEFNTSEFARLSVDSLSNEISSFLDTIKLDISPKNVEVNLLGANMFSYDFNVEETYPGKLLLSIMDKITSTLPDVNKNSITIGANQYEVRINSEGRKELLAHSGKWINKEEAIMSDLSSKEYIFFDSIDNKLKAKSKNIPGLASISEDIKTLLLDASVSPDTKFILNNLKLNIESSIGDYIYYEKLEPVKNIIHNSIDDLIDEFNLLENVSDELYELKKLNNLDEKYLISFEDISKNNSTYSVRFINKSNGESVYVETEKEIFSKYSEHITKEISTIKNSIITDVNGNLLDNIQLDHTSQVNTLNAAFFIQSLIDYSSNKDVLNDLSTSVKVQLYAQLFSTGLNTIYDSIQLVNLISNAVNDTINVLPTITEGIPIVSTILDGINLGAAIKELLDEHDPLLKKELEAKVGVLAINMSLSIAATVASIVGIGAEVTIFLLPIAGISAGIPSLVNNELILHDKATSVVNYFNHLSESKKYGPLKTEDDKILVPIDDLVISEIDFNNNSIKLGTCNILAMEGGSGHTVTGNIDHFFSSPSISSHIPSLSIYSAIGIETENLDFSKKIMMLPNAPSRVFWWETGAVPGLRSLENDGTRLLDSIRDLYPGKFYWRFYAFFDYAITTLKPVYEDTNIKIKLDKDTRNFIMPTITTNEIRNKLSYSFDGAGGTYSLLLSSYPISTNINLSKDDLWIFNIDNEVREISIENGTIKKGKLIKDVLSKIDINKNKLIIGNQTIDFSGDIDNKDRYIFLTCELDDKISLIIEINLVAKSYSLLLSGDKNYLISNLSNTIEKINTLGLDSKNIAYNYTDESNNKYFGAISKTSQKSIIHYKKDSKNILEFYNDSTLEFNSKDFIAEDINVFMKDDINTITGKYYVDNNTDKSIDFSISLVSKNQVKVNGLYLNESVYSSYLDFVKNSDGHHNTSNFMNLFLDNISFWKLFGFENINFVIDKYFTLVGKTNLGYVEFICDNNKNIDIYFGEWKTSSSKSTIFSGNGRNVVVEPIYNPDTGEDISTSLDFSYEPLYGIDRYINKVLIAPDLYTSLININTNYYSNEYYPEIIVLNPNTFHKKVNINLDSSSFEYKWSTEGSDFILVRYLEESNKKILQKIRIKGILSNTQSFNKMSIDFKDIKKLSLGYIMSNFKSFNSENELDRDHLGFKIIDNKTYYYDEDSKLVKGLININNSLFYFDPIEFNLVTGWQTINGKKYYFDINTGAALTSYKIINGKHFYFNNDGVMQLGVFKGPDGFEYFAPANTQNNNIEGQAIVYQSKFLTLNGKKYYFDNDSKAVTGWRIINNEKYYFNPNNAIAAVGLQVIDNNKYYFNPDTAIISKGWQTVNGSRYYFDTDTAIAFNGYKTIDGKHFYFDSDCVVKIGVFSTSNGFEYFAPANTYNNNIEGQAIVYQSKFLTLNGKKYYFDDNSKAVTGWQTIDSKKYYFNTNTAEAATGWQTIDGKKYYFNTNTAEAATGWQTIDGKKYYFNTNTAIASTGYTIINGKHFYFNTDGIMQIGVFKGPNGFEYFAPANTDANNIEGQAILYQNEFLTLNGKKYYFGSDSKAVTGWRIINNKKYYFNPNNAIAAIHLCTINNDKYYFSYDGILQNGYITIERNNFYFDANNESKMVTGVFKGPNGFEYFAPANTYNNNIEGQAIVYQNKFLTLNGKKYYFDNDSKAVTGWQTIDGKKYYFNLNTAEAATGWQTIDGKKYYFNLNTAEAATGWQTIDGKKYYFNTNTFIASTGYTSINGKHFYFNTDGIMQIGVFKGPNGFEYFAPANTHNNNIEGQAILYQNKFLTLNGKKYYFGSDSKAVTGLRTIDGKKYYFNTNTAVAVTGWQTINGKKYYFNTNTSIASTGYTIISGKHFYFNTDGIMQIGVFKGPDGFEYFAPANTDANNIEGQAIRYQNRFLYLHDNIYYFGNNSKAATGWVTIDGNRYYFEPNTAMGANGYKTIDNKNFYFRNGLPQIGVFKGSNGFEYFAPANTDANNIEGQAIRYQNRFLHLLGKIYYFGNNSKAVTGWQTINGKVYYFMPDTAMAAAGGLFEIDGVIYFFGVDGVKAPGIYG

SEQ ID NO: 690 - protein, 2709 aa, synthetic construct
  REGION 1..2709: note = Synthetic amino acid sequence
SLISKEELIKLAYSIRPRENEYKTILTNLDEYNKLTTNNNENKYLQLKKLNESIDVFMNKYKTSSRNRALSNLKKDILKEVILIKNSNTSPVEKNLHFVWIGGEVSDIALEYIKQWADINAEYNIKLWYDSEAFLVNTLKKAIVESSTTEALQLLEEEIQNPQFDNMKFYKKRMEFIYDRQKRFINYYKSQINKPTVPTIDDIIKSHLVSEYNRDETVLESYRTNSLRKINSNHGIDIRANSLFTEQELLNIYSQGLLNRGNLAAASDIVRLLALKNFGGVYLAVAMLPGIHSDLFKTISRPSSIGLDRWEMIKLEAIMKYKKYINNYTSENFDKLDQQLKDNFKLIIESKSEKSEIFSKLENLNVSDLEIKIAFALGSVINQALISKQGSYLTNLVIEQVKNRYQFLNQHLNPAIESDNNFTDTTKIFHDSLFNSATAENSMFLTKIAPYLQVGFMPEARSTISLSGPGAYASAYYDFINLQENTIEKTLKASDLIEFKFPENNLSQLTEQEINSLWSFDQASAKYQFEKYVRDYTGGSLSEDNGVDFNKNTALDKNYLLNNKIPSNNVEEAGSKNYVHYIIQLQGDDISYEATCNLFSKNPKNSIIIQRNMNESAKSYFLSDDGESILELNKYRIPERLKNKEKVKVTFIGHGKDEFNTSEFARLSVDSLSNEISSFLDTIKLDISPKNVEVNLLGANMFSYDFNVEETYPGKLLLSIMDKITSTLPDVNKNSITIGANQYEVRINSEGRKELLAHSGKWINKEEAIMSDLSSKEYIFFDSIDNKLKAKSKNIPGLASISEDIKTLLLDASVSPDTKFILNNLKLNIESSIGDYIYYEKLEPVKNIIHNSIDDLIDEFNLLENVSDELYELKKLNNLDEKYLISFEDISKNNSTYSVRFINKSNGESVYVETEKEIFSKYSEHITKEISTIKNSIITDVNGNLLDNIQLDHTSQVNTLNAAFFIQSLIDYSSNKDVLNDLSTSVKVQLYAQLFSTGLNTIYDSIQLVNLISNAVNDTINVLPTITEGIPIVSTILDGINLGAAIKELLDEHDPLLKKELEAKVGVLAINMSLSIAATVASIVGIGAEVTIFLLPIAGISAGIPSLVNNELILHDKATSVVNYFNHLSESKKYGPLKTEDDKILVPIDDLVISEIDFNNNSIKLGTCNILAMEGGSGHTVTGNIDHFFSSPSISSHIPSLSIYSAIGIETENLDFSKKIMMLPNAPSRVFWWETGAVPGLRSLENDGTRLLDSIRDLYPGKFYWRFYAFFDYAITTLKPVYEDTNIKIKLDKDTRNFIMPTITTNEIRNKLSYSFDGAGGTYSLLLSSYPISTNINLSKDDLWIFNIDNEVREISIENGTIKKGKLIKDVLSKIDINKNKLIIGNQTIDFSGDIDNKDRYIFLTCELDDKISLIIEINLVAKSYSLLLSGDKNYLISNLSNIIEKINTLGLDSKNIAYNYTDESNNKYFGAISKTSQKSIIHYKKDSKNILEFYNDSTLEFNSKDFIAEDINVFMKDDINTITGKYYVDNNTDKSIDFSISLVSKNQVKVNGLYLNESVYSSYLDFVKNSDGHHNTSNFMNLFLDNISFWKLFGFENINFVIDKYFTLVGKTNLGYVEFICDNNKNIDIYFGEWKTSSSKSTIFSGNGRNVVVEPIYNPDTGEDISTSLDFSYEPLYGIDRYINKVLIAPDLYTSLININTNYYSNEYYPEIIVLNPNTFHKKVNINLDSSSFEYKWSTEGSDFILVRYLEESNKKILQKIRIKGILSNTQSFNKMSIDFKDIKKLSLGYIMSNFKSFNSENELDRDHLGFKIIDNKTYYYDEDSKLVKGLININNSLFYFDPIEFNLVTGWQTINGKKYYFDINTGAALISYKIINGKHFYFNNDGVMQLGVFKGPDGFEYFAPANTQNNNIEGQAIVYQSKFLTLNGKKYYFDNDSKAVTGWRIINNEKYYFNPNNAIAAVGLQVIDNNKYYFNPDTAIISKGWQTVNGSRYYFDTDTAIAFNGYKTIDGKHFYFDSDCVVKIGVFSTSNGFEYFAPANTYNNNIEGQAIVYQSKFLTLNGKKYYFDNNSKAVTGWQTIDSKKYYFNTNTAEAATGWQTIDGKKYYFNTNTAEAATGWQTIDGKKYYFNTNTAIASTGYTIINGKHFYFNTDGIMQIGVFKGPNGFEYFAPANTDANNIEGQAILYQNEFLTLNGKKYYFGSDSKAVTGWRIINNKKYYFNPNNAIAAIHLCTINNDKYYFSYDGILQNGYITIERNNFYFDANNESKMVTGVFKGPNGFEYFAPANTHNNNIEGQAIVYQNKFLTLNGKKYYFDNDSKAVTGWQTIDGKKYYFNLNTAEAATGWQTIDGKKYYFNLNTAEAATGWQTIDGKKYYFNTNTFIASTGYTSINGKHFYFNTDGIMQIGVFKGPNGFEYFAPANTHNNNIEGQAILYQNKFLTLNGKKYYFGSDSKAVTGLRTIDGKKYYFNTNTAVAVTGWQTINGKKYYFNTNTSIASTGYTIISGKHFYFNTDGIMQIGVFKGPDGFEYFAPANTDANNIEGQAIRYQNRFLYLHDNIYYFGNNSKAATGWVTIDGNRYYFEPNTAMGANGYKTIDNKNFYFRNGLPQIGVFKGSNGFEYFAPANTDANNIEGQAIRYQNRFLHLLGKIYYFGNNSKAVTGWQTINGKVYYFMPDTAMAAAGGLFEIDGVIYFFGVDGVKAPGIYG

SEQ ID NO: 691 - protein, 2709 aa, synthetic construct; identical to SEQ ID NO: 665
  REGION 1..2709: note = Synthetic amino acid sequence

SEQ ID NO: 692 - protein, 2709 aa, synthetic construct
  REGION 1..2709: note = Synthetic amino acid sequence
SLISKEELIKLAYSIRPRENEYKTILTNLDEYNKLTTNNNENKYLQLKKLNESIDVFMNKYKTSSRNRALSNLKKDILKEVILIKNSNTSPVEKNLHFVWIGGEVSDIALEYIKQWADINAEYNIKLWYDSEAFLVNTLKKAIVESSTTEALQLLEEEIQNPQFDNMKFYKKRMEFIYDRQKRFINYYKSQINKPTVPTIDDIIKSHLVSEYNRDETVLESYRTNSLRKINSNHGIDIRANSLFTEQELLNIYSQELLNRGNLAAASDIVRLLALKNFGGVYLAVAMLPGIHSDLFKTISRPSSIGLDRWEMIKLEAIMKYKKYINNYTSENFDKLDQQLKDNFKLIIESKSEKSEIFSKLENLNVSDLEIKIAFALGSVINQALISKQGSYLTNLVIEQVKNRYQFLNQHLNPAIESDNNFTDTTKIFHDSLFNSATAENSMFLTKIAPYLQVGFMPEARSTISLSGPGAYASAYYDFINLQENTIEKTLKASDLIEFKFPENNLSQLTEQEINSLWSFDQASAKYQFEKYVRDYTGGSLSEDNGVDFNKNTALDKNYLLNNKIPSNNVEEAGSKNYVHYIIQLQGDDISYEATCNLFSKNPKNSIIIQRNMNESAKSYFLSDDGESILELNKYRIPERLKNKEKVKVTFIGHGKDEFNTSEFARLSVDSLSNEISSFLDTIKLDISPKNVEVNLLGANMFSYDFNVEETYPGKLLLSIMDKITSTLPDVNKNSITIGANQYEVRINSEGRKELLAHSGKWINKEEAIMSDLSSKEYIFFDSIDNKLKAKSKNIPGLASISEDIKTLLLDASVSPDTKFILNNLKLNIESSIGDYIYYEKLEPVKNIIHNSIDDLIDEFNLLENVSDELYELKKLNNLDEKYLISFEDISKNNSTYSVRFINKSNGESVYVETEKEIFSKYSEHITKEISTIKNSIITDVNGNLLDNIQLDHTSQVNTLNAAFFIQSLIDYSSNKDVLNDLSTSVKVQLYAQLFSTGLNTIYDSIQLVNLISNAVNDTINVLPTITEGIPIVSTILDGINLGAAIKELLDEHDPLLKKELEAKVGVLAINMSLSIAATVASIVGIGAEVTIFLLPIAGISAGIPSLVNNELILHDKATSVVNYFNHLSESKKYGPLKTEDDKILVPIDDLVISEIDFNNNSIKLGTCNILAMEGGSGHTVTGNIDHFFSSPSISSHIPSLSIYSAIGIETENLDFSKKIMMLPNAPSRVFWWETGAVPGLRSLENDGTRLLDSIRDLYPGKFYWRFYAFFDYAITTLKPVYEDTNIKIKLDKDTRNFIMPTITTNEIRNKLSYSFDGAGGTYSLLLSSYPISTNINLSKDDLWIFNIDNEVREISIENGTIKKGKLIKDVLSKIDINKNKLIIGNQTIDFSGDIDNKDRYIFLTCELDDKISLIIEINLVAKSYSLLLSGDKNYLISNLSNTIEKINTLGLDSKNIAYNYTDESNNKYFGAISKTSQKSIIHYKKDSKNILEFYNDSTLEFNSKDFIAEDINVFMKDDINTITGKYYVDNNTDKSIDFSISLVSKNQVKVNGLYLNESVYSSYLDFVKNSDGHHNTSNFMNLFLDNISFWKLFGFENINFVIDKYFTLVGKTNLGYVEFICDNNKNIDIYFGEWKTSSSKSTIFSGNGRNVVVEPIYNPDTGEDISTSLDFSYEPLYGIDRYINKVLIAPDLYTSLININTNYYSNEYYPEIIVLNPNTFHKKVNINLDSSSFEYKWSTEGSDFILVRYLEESNKKILQKIRIKGILSNTQSFNKMSIDFKDIKKLSLGYIMSNFKSFNSENELDRDHLGFKIIDNKTYYYDEDSKLVKGLININNSLFYFDPIEFNLVTGWQTINGKKYYFDINTGAALTSYKIINGKHFYFNNDGVMQLGVFKGPDGFEYFAPANTQNNNIEGQAIVYQSKFLTLNGKKYYFDNNSKAVTGWRIINNEKYYFNPNNAIAAVGLQVIDNNKYYFNPDTAIISKGWQTVNGSRYYFDTDTAIAFNGYKTIDGKHFYFDSDCVVKIGVFSTSNGFEYFAPANTYNNNIEGQAIVYQSKFLTLNGKKYYFDNNSKAVTGWQTIDSKKYYFNTNTAEAATGWQTIDGKKYYFNTNTAEAATGWQTIDGKKYYFNTNTAIASTGYTIINGKHFYFNTDGIMQIGVFKGPNGFEYFAPANTDANNIEGQAILYQNEFLTLNGKKYYFGSDSKAVTGWRIINNKKYYFNPNNAIAAIHLCTINNDKYYFSYDGILQNGYITIERNNFYFDANNESKMVTGVFKGPNGFEYFAPANTHNNNIEGQAIVYQNKFLTLNGKKYYFDNDSKAVTGWQTIDGKKYYFNLNTAEAATGWQTIDGKKYYFNLNTAEAATGWQTIDGKKYYFNTNTFIASTGYTSINGKHFYFNTDGIMQIGVFKGPNGFEYFAPANTDANNIEGQAILYQNKFLTLNGKKYYFGSDSKAVTGLRTIDGKKYYFNTNTAVAVTGWQTINGKKYYFNTNTSIASTGYTIISGKHFYFNTDGIMQIGVFKGPDGFEYFAPANTDANNIEGQAIRYQNRFLYLHDNIYYFGNNSKAATGWVTIDGNRYYFEPNTAMGANGYKTIDNKNFYFRNGLPQIGVFKGSNGFEYFAPANTDANNIEGQAIRYQNRFLHLLGKIYYFGNNSKAVTGWQTINGKVYYFMPDTAMAAAGGLFEIDGVIYFFGVDGVKAPGIYG

SEQ ID NO: 693 - protein, 2709 aa, synthetic construct
  REGION 1..2709: note = Synthetic amino acid sequence
SLISKEELIKLAYSIRPRENEYKTILTNLDEYNKLTTNNNENKYLQLKKLNESIDVFMNKYKTSSRNRALSNLKKDILKEVILIKNSNTSPVEKNLHFVWIGGEVSDIALEYIKQWADINAEYNIKLWYDSEAFLVNTLKKAIVESSTTEALQLLEEEIQNPQFDNMKFYKKRMEFIYDRQKRFINYYKSQINKPTVPTIDDIIKSHLVSEYNRDETVLESYRTNSLRKINSNHGIDIRANSLFTEQELLNIYSQELLNRGNLAAASDIVRLLALKNFGGVYLAVAMLPGIHSDLFKTISRPSSIGLDRWEMIKLEAIMKYKKYINNYTSENFDKLDQQLKDNFKLIIESKSEKSEIFSKLENLNVSDLEIKIAFALGSVINQALISKQGSYLTNLVIEQVKNRYQFLNQHLNPAIESDNNFTDTTKIFHDSLFNSATAENSMFLTKIAPYLQVGFMPEARSTISLSGPGAYASAYYDFINLQENTIEKTLKASDLIEFKFPENNLSQLTEQEINSLWSFDQASAKYQFEKYVRDYTGGSLSEDNGVDFNKNTALDKNYLLNNKIPSNNVEEAGSKNYVHYIIQLQGDDISYEATCNLFSKNPKNSIIIQRNMNESAKSYFLSDDGESILELNKYRIPERLKNKEKVKVTFIGHGKDEFNTSEFARLSVDSLSNEISSFLDTIKLDISPKNVEVNLLGANMFSYDFNVEETYPGKLLLSIMDKITSTLPDVNKNSITIGANQYEVRINSEGRKELLAHSGKWINKEEAIMSDLSSKEYIFFDSIDNKLKAKSKNIPGLASISEDIKTLLLDASVSPDTKFILNNLKLNIESSIGDYIYYEKLEPVKNIIHNSIDDLIDEFNLLENVSDELYELKKLNNLDEKYLISFEDISKNNSTYSVRFINKSNGESVYVETEKEIFSKYSEHITKEISTIKNSIITDVNGNLLDNIQLDHTSQVNTLNAAFFIQSLIDYSSNKDVLNDLSTSVKVQLYAQLFSTGLNTIYDSIQLVNLISNAVNDTINVLPTITEGIPIVSTILDGINLGAAIKELLDEHDPLLKKELEAKVGVLAINMSLSIAATVASIVGIGAEVTIFLLPIAGISAGIPSLVNNELILHDKATSVVNYFNHLSESKKYGPLKTEDDKILVPIDDLVISEIDFNNNSIKLGTCNILAMEGGSGHTVTGNIDHFFSSPSISSHIPSLSIYSAIGIETENLDFSKKIMMLPNAPSRVFWWETGAVPGLRSLENDGTRLLDSIRDLYPGKFYWRFYAFFDYAITTLKPVYEDTNIKIKLDKDTRNFIMPTITTNEIRNKLSYSFDGAGGTYSLLLSSYPISTNINLSKDDLWIFNIDNEVREISIENGTIKKGKLIKDVLSKIDINKNKLIIGNQTIDFSGDIDNKDRYIFLTCELDDKISLIIEINLVAKSYSLLLSGNKNYLISNLSNTIEKINTLGLDSKNIAYNYTDESNNKYFGAISKTSQKSIIHYKKDSKNILEFYNDSTLEFNSKDFIAEDINVFMKDDINTITGKYYVDNNTDKGIDFSISLVSKNQVKVNGLYLNESVYSSYLDFVKNSDGHHNTSNFMNLFLDNISFWKLFGFENINFVIDKYFTLVGKTNLGYVEFICDNNKNIDIYFGEWKTSSSKSTIFSGNGRNVVVEPIYNPDTGEDISTSLDFSYEPLYGIDRYINKVLIAPDLYTSLININTNYYSNEYYPEIIVLNPNTFHKKVNINLDSSSFEYKWSTEGSDFILVRYLEESNKKILQKIRIKGILSNTQSFNKMSIDFKDIKKLSLGYIMSNFKSFNSENELDRDHLGFKIIDNKTYYYDEDSKLVKGLININNSLFYFDPIEFNLVTGWQTINGKKYYFDINTGAALTSYKIINGKHFYFNNDGVMQLGVFKGPDGFEYFAPANTQNNNIEGQAIVYQSKFLTLNGKKYYFDNDSKAVTGWRIINNEKYYFNPNNAIAAVGLQVIDNNKYYFNPDTAIISKGWQTVNGSRYYFDTDTAIAFNGYKTIDGKHFYFDSDCVVKIGVFSTSNGFEYFAPANTYNNNIEGQAIVYQSKFLTLNGKKYYFDDNSKAVTGWQTIDSKKYYFNTNTAEAATGWQTIDGKKYYFNTNTAEAATGWQTIDGKKYYFNTNTAIASTGYTIINGKHFYFNTDGIMQIGVFKGPNGFEYFAPANTDANNIEGQAILYQNEFLTLNGKKYYFGSDSKAVTGWRIINNKKYYFNPNNAIAAIHLCTINNDKYYFSYDGILQNGYITIERNNFYFDANNESKMVTGVFKGPNGFEYFAPANTHNNNIEGQAIVYQNKFLTLNGKKYYFDNDSKAVTGWQTIDGKKYYFNLNTAEAATGWQTIDGKKYYFNLNTAEAATGWQTIDGKKYYFNTNTFIASTGYTSINGKHFYFNTDGIMQIGVFKGPNGFEYFAPANTHNNNIEGQAILYQNKFLTLNGKKYYFGSDSKAVTGLRTIDGKKYYFNTNTAVAVTGWQTINGKKYYFNTNTSIASTGYTIISGKHFYFNTDGIMQIGVFKGPDGFEYFAPANTDANNIEGQAIRYQNRFLYLHDNIYYFGNNSKAATGWVTIDGNRYYFEPNTAMGANGYKTIDNKNFYFRNGLPQIGVFKGSNGFEYFAPANTDANNIEGQAIRYQNRFLHLLGKIYYFGNNSKAVTGWQTINGKVYYFMPDTAMAAAGGLFEIDGVIYFFGVDGVKAPGIYG

SEQ ID NO: 694 - protein, 2709 aa, synthetic construct; identical to SEQ ID NO: 693
  REGION 1..2709: note = Synthetic amino acid sequence

SEQ ID NO: 695 - protein, 2709 aa, synthetic construct; identical to SEQ ID NO: 665
  REGION 1..2709: note = Synthetic amino acid sequence

SEQ ID NO: 696 - protein, 2709 aa, synthetic construct; identical to SEQ ID NO: 674
  REGION 1..2709: note = Synthetic amino acid sequence

SEQ ID NO: 697 - protein, 2709 aa, synthetic construct
  REGION 1..2709: note = Synthetic amino acid sequence
SLISKEELIKLAYSIRPRENEYKTILTNLDEYNKLTTNNNENKYLQLKKLNESIDVFMNKYKTSSRNRALSNLKKDILKEVILIKNSNTSPVEKNLHFVWIGGEVSDIALEYIKQWADINAEYNIKLWYDSEAFLVNTLKKAIVESSTTEALQLLEEEIQNPQFDNMKFYKKRMEFIYDRQKRFINYYKSQINKPTVPTIDDIIKSHLVSEYNRDETVLESYRTNSLRKINSNHGIDIRANSLFTEQELLNIYSQELLNRGNLAAASDIVRLLALKNFGGVYLAVAMLPGIHSDLFKTISRPSSIGLDRWEMIKLEAIMKYKKYINNYTSENFDKLDQQLKDNFKLIIESKSEKSEIFSKLENLNVSDLEIKIAFALGSVINQALISKQGSYLTNLVIEQVKNRYQFLNQHLNPAIESDNNFTDTTKIFHDSLFNSATAENSMFLTKIAPYLQVGFMPEARSTISLSGPGAYASAYYDFINLQENTIEKTLKASDLIEFKFPENNLSQLTEQEINSLWSFDQASAKYQFEKYVRDYTGGSLSEDNGVDFNKNTALDKNYLLNNKIPSNNVEEAGSKNYVHYIIQLQGDDISYEATCNLFSKNPKNSIIIQRNMNESAKSYFLSDDGESILELNKYRIPERLKNKEKVKVTFIGHGKDEFNTSEFARLSVDSLSNEISSFLDTIKLDISPKNVEVNLLGANMFSYDFNVEETYPGKLLLSIMDKITSTLPDVNKNSITIGANQYEVRINSEGRKELLAHSGKWINKEEAIMSDLSSKEYIFFDSIDNKLKAKSKNIPGLASISEDIKTLLLDASVSPDTKFILNNLKLNIESSIGDYIYYEKLEPVKNIIHNSIDDLIDEFNLLENVSDELYELKKLNNLDEKYLISFEDISKNNSTYSVRFINKSNGESVYVETEKEIFSKYSEHITKEISTIKNSIITDVNGNLLDNIQLDHTSQVNTLNAAFFIQSLIDYSSNKDVLNDLSTSVKVQLYAQLFSTGLNTIYDSIQLVNLISNAVNDTINVLPTITEGIPIVSTILDGINLGAAIKELLDEHDPLLKKELEAKVGVLAINMSLSIAATVASIVGIGAEVTIFLLPIAGISAGIPSLVNNELILHDKATSVVNYFNHLSESKKYGPLKTEDDKILVPIDDLVISEIDFNNNSIKLGTCNILAMEGGSGHTVTGNIDHFFSSPSISSHIPSLSIYSAIGIETENLDFSKKIMMLPNAPSRVFWWETGAVPGLRSLENDGTRLLDSIRDLYPGKFYWRFYAFFDYAITTLKPVYEDTNIKIKLDKDTRNFIMPTITTNEIRNKLSYSFDGAGGTYSLLLSSYPISTNINLSKDDLWIFNIDNEVREISIENGTIKKGKLIKDVLSKIDINKNKLIIGNQTIDFSGDIDNKDRYIFLTCELDDKISLIIEINLVAKSYSLLLSGDKNYLISNLSNTIEKINTLGLDSKNIAYNYTDESNNKYFGAISKTSQKSIIHYKKDSKNILEFYNDSTLEFNSKDFIAEDINVFMKDDINTITGKYYVDNNTDKSIDFSISLVSKNQVKVNGLYLNESVYSSYLDFVKNSDGHHNTSNFMNLFLDNISFWKLFGFENINFVIDKYFTLVGKTNLGYVEFICDNNKNIDIYFGEWKTSSSKSTIFSGNGRNVVVEPIYNPNTGEDISTSLDFSYEPLYGIDRYINKVLIAPDLYTSLININTNYYSNEYYPEIIVLNPNTFHKKVNINLDSSSFEYKWSTEGSDFILVRYLEESNKKILQKIRIKGILSNTQSFNKMSIDFKDIKKLSLGYIMSNFKSFNSENELDRDHLGFKIIDNKTYYYDEDSKLVKGLININNSLFYFDPIEFNLVTGWQTINGKKYYFDINTGAALTSYKIINGKHFYFNNDGVMQLGVFKGPDGFEYFAPANTQNNNIEGQAIVYQSKFLTLNGKKYYFDNNSKAVTGWRIINNEKYYFNPNNAIAAVGLQVIDNNKYYFNPDTAIISKGWQTVNGSRYYFDTDTAIAFNGYKTIDGKHFYFDSDCVVKIGVFSTSNGFEYFAPANTYNNNIEGQAIVYQSKFLTLNGKKYYFDNNSKAVTGWQTIDSKKYYFNTNTAEAATGWQTIDGKKYYFNTNTAEAATGWQTIDGKKYYFNTNTAIASTGYTIINGKHFYFNTDGIMQIGVFKGPNGFEYFAPANTDANNIEGQAILYQNEFLTLNGKKYYFGSDSKAVTGWRIINNKKYYFNPNNAIAAIHLCTINNDKYYFSYDGILQNGYITIERNNFYFDANNESKMVTGVFKGPNGFEYFAPANTHNNNIEGQAIVYQNKFLTLNGKKYYFDNDSKAVTGWQTIDGKKYYFNLNTAEAATGWQTIDGKKYYFNLNTAEAATGWQTIDGKKYYFNTNTFIASTGYTSINGKHFYFNTDGIMQIGVFKGPNGFEYFAPANTDANNIEGQAILYQNKFLTLNGKKYYFGSDSKAVTGLRTIDGKKYYFNTNTAVAVTGWQTINGKKYYFNTNTSIASTGYTIISGKHFYFNTDGIMQIGVFKGPDGFEYFAPANTDANNIEGQAIRYQNRFLYLHDNIYYFGNNSKAATGWVTIDGNRYYFEPNTAMGANGYKTIDNKNFYFRNGLPQIGVFKGSNGFEYFAPANTDANNIEGQAIRYQNRFLHLLGKIYYFGNNSKAVTGWQTINGKVYYFMPDTAMAAAGGLFEIDGVIYFFGVDGVKAPGIYG

SEQ ID NO: 698 - protein, 2709 aa, synthetic construct
  REGION 1..2709: note = Synthetic amino acid sequence
SLISKEELIKLAYSIRPRENEYKTILTNLDEYNKLTTNNNENKYLQLKKLNESIDVFMNKYKTSSRNRALSNLKKDILKEVILIKNSNTSPVEKNLHFVWIGGEVSDIALEYIKQWADINAEYNIKLWYDSEAFLVNTLKKAIVESSTTEALQLLEEEIQNPQFDNMKFYKKRMEFIYDRQKRFINYYKSQINKPTVPTIDDIIKSHLVSEYNRDETVLESYRTNSLRKINSNHGIDIRANSLFTEQELLNIYSQELLNRGNLAAASDIVRLLALKNFGGVYLAVAMLPGIHSDLFKTISRPSSIGLDRWEMIKLEAIMKYKKYINNYTSENFDKLDQQLKDNFKLIIESKSEKSEIFSKLENLNVSDLEIKIAFALGSVINQALISKQGSYLTNLVIEQVKNRYQFLNQHLNPAIESDNNFTDTTKIFHDSLFNSATAENSMFLTKIAPYLQVGFMPEARSTISLSGPGAYASAYYDFINLQENTIEKTLKASDLIEFKFPENNLSQLTEQEINSLWSFDQASAKYQFEKYVRDYTGGSLSEDNGVDFNKNTALDKNYLLNNKIPSNNVEEAGSKNYVHYIIQLQGDDISYEATCNLFSKNPKNSIIIQRNMNESAKSYFLSDDGESILELNKYRIPERLKNKEKVKVTFIGHGKDEFNTSEFARLSVDSLSNEISSFLDTIKLDISPKNVEVNLLGANMFSYDFNVEETYPGKLLLSIMDKITSTLPDVNKNSITIGANQYEVRINSEGRKELLAHSGKWINKEEAIMSDLSSKEYIFFDSIDNKLKAKSKNIPGLASISEDIKTLLLDASVSPDTKFILNNLKLNIESSIGDYIYYEKLEPVKNIIHNSIDDLIDEFNLLENVSDELYELKKLNNLDEKYLISFEDISKNNSTYSVRFINKSNGESVYVETEKEIFSKYSEHITKEISTIKNSIITDVNGNLLDNIQLDHTSQVNTLNAAFFIQSLIDYSSNKDVLNDLSTSVKVQLYAQLFSTGLNTIYDSIQLVNLISNAVNDTINVLPTITEGIPIVSTILDGINLGAAIKELLDEHDPLLKKELEAKVGVLAINMSLSIAATVASIVGIGAEVTIFLLPIAGISAGIPSLVNNELILHDKATSVVNYFNHLSESKKYGPLKTEDDKILVPIDDLVISEIDFNNNSIKLGTCNILAMEGGSGHTVTGNIDHFFSSPSISSHIPSLSIYSAIGIETENLDFSKKIMMLPNAPSRVFWWETGAVPGLRSLENDGTRLLDSIRDLYPGKFYWRFYAFFDYAITTLKPVYEDTNIKIKLDKDTRNFIMPTITTNEIRNKLSYSFDGAGGTYSLLLSSYPISTNINLSKDDLWIFNIDNEVREISIENGTIKKGKLIKDVLSKIDINKNKLIIGNQTIDFSGDIDNKDRYIFLTCELDDKISLIIEINLVAKSYSLLLSGDKNYLISNLSNTIEKINTLGLDSKNIAYNYTDESNNKYFGAISKTSQKSIIHYKKDSKNILEFYNDSTLEFNSKDFIAEDINVFMKDDVNTITGKYYVDNNTDKSIDFSISLVSKNQVKVNGLYLNESVYSSYLDFVKNSDGHHNTSNFMNLFLDNISFWKLFGFENINFVIDKYFTLVGKTNLGYVEFICDNNKNIDIYFGEWKTSSSKSTIFSGNGRNVVVEPIYNPDTGEDISTSLDFSYEPLYGIDRYINKVLIAPDLYTSLININTNYYSNEYYPEIIVLNPNTFHKKVNINLDSSSFEYKWSTEGSDFILVRYLEESNKKILQKIRIKGILSNTQSFNKMSIDFKDIKKLSLGYIMSNFKSFNSENELDRDHLGFKIIDNKTYYYDEDSKLVKGLININNSLFYFDPIEFNLVTGWQTINGKKYYFDINTGAALTSYKIINGKHFYFNNDGVMQLGVFKGPDGFEYFAPANTQNNNIEGQAIVYQSKFLTLNGKKYYFDNNSKAVTGWRIINNEKYYFNPNNAIAAVGLQVIDNNKYYFNPDTAIISKGWQTVNGSRYYFDTDTAIAFNGYKTIDGKHFYFDSDCVVKIGVFSTSNGFEYFAPANTYNNNIEGQAIVYQSKFLTLNGKKYYFDNNSKAVTGWQTIDSKKYYFNTNTAEAATGWQTIDGKKYYFNTNTAEAATGWQTIDGKKYYFNTNTAIASTGYTIINGKHFYFNTDGIMQIGVFKGPNGFEYFAPANTDANNIEGQAILYQNEFLTLNGKKYYFGSDSKAVTGWRIINNKKYYFNPNNAIAAIHLCTINNDKYYFSYDGILQNGYITIERNNFYFDANNESKMVTGVFKGPNGFEYFAPANTHNNNIEGQAIVYQNKFLTLNGKKYYFDNDSKAVTGWQTIDGKKYYFNLNTAEAATGWQTIDGKKYYFNLNTAEAATGWQTIDGKKYYFNTNTFIASTGYTSINGKHFYFNTDGIMQIGVFKGPNGFEYFAPANTHNNNIEGQAILYQNKFLTLNGKKYYFGSDSKAVTGLRTIDGKKYYFNTNTAVAVTGWQTINGKKYYFNTNTSIASTGYTIISGKHFYFNTDGIMQIGVFKGPDGFEYFAPANTDANNIEGQAIRYQNRFLYLHDNIYYFGNNSKAATGWVTIDGNRYYFEPNTAMGANGYKTIDNKNFYFRNGLPQIGVFKGSNGFEYFAPANTDANNIEGQAIRYQNRFLHLLGKIYYFGNNSKAVTGWQTINGKVYYFMPDTAMAAAGGLFEIDGVIYFFGVDGVKAPGIYG

SEQ ID NO: 699 - protein, 2709 aa, synthetic construct
  REGION 1..2709: note = Synthetic amino acid sequence
SLISKEELIKLAYSIRPRENEYKTILTNLDEYNKLTTNNNENKYLQLKKLNESIDVFMNKYKTSSRNRALSNLKKDILKEVILIKNSNTSPVEKNLHFVWIGGEVSDIALEYIKQWADINAEYNIKLWYDSEAFLVNTLKKAIVESSTTEALQLLEEEIQNPQFDNMKFYKKRMEFIYDRQKRFINYYKSQINKPTVPTIDDIIKSHLVSEYNRDETLLESYRTNSLRKINSNHGIDIRANSLFTEQELLNIYSQELLNRGNLAAASDIVRLLALKNFGGVYLAVAMLPGIHSDLFKTISRPSSIGLDRWEMIKLEAIMKYKKYINNYTSENFDKLDQQLKDNFKLIIESKSEKSEIFSKLENLNVSDLEIKIAFALGSVINQALISKQGSYLTNLVIEQVKNRYQFLNQHLNPAIESDNNFTDTTKIFHDSLFNSATAENSMFLTKIAPYLQVGFMPEARSTISLSGPGAYASAYYDFINLQENTIEKTLKASDLIEFKFPENNLSQLTEQEINSLWSFDQASAKYQFEKYVRDYTGGSLSEDNGVDFNKNTALDKNYLLNNKIPSNNVEEAGSKNYVHYIIQLQGDDISYEATCNLFSKNPKNSIIIQRNMNESAKSYFLSDDGESILELNKYRIPERLKNKEKVKVTFIGHGKDEFNTSEFARLSVDSLSNEISSFLDTIKLDISPKNVEVNLLGANMFSYDFNVEETYPGKLLLSIMDKITSTLPDVNKNSITIGANQYEVRINSEGRKELLAHSGKWINKEEAIMSDLSSKEYIFFDSIDNKLKAKSKNIPGLASISEDIKTLLLDASVSPDTKFILNNLKLNIESSIGDYIYYEKLEPVKNIIHNSIDDLIDEFNLLENVSDELYELKKLNNLDEKYLISFEDISKNNSTYSVRFINKSNGESVYVETEKEIFSKYSEHITKEISTIKNSIITDVNGNLLDNIQLDHTSQVNTLNAAFFIQSLIDYSSNKDVLNDLSTSVKVQLYAQLFSTGLNTIYDSIQLVNLISNAVNDTINVLPTITEGIPIVSTILDGINLGAAIKELLDEHDPLLKKELEAKVGVLAINMSLSIAATVASIVGIGAEVTIFLLPIAGISAGIPSLVNNELILHDKATSVVNYFNHLSESKKYGPLKTEDDKILVPIDDLVISEIDFNNNSIKLGTCNILAMEGGSGHTVTGNIDHFFSSPSISSHIPSLSIYSAIGIETENLDFSKKIMMLPNAPSRVFWWETGAVPGLRSLENDGTRLLDSIRDLYPGKFYWRFYAFFDYAITTLKPVYEDTNIKIKLDKDTRNFIMPTITTNEIRNKLSYSFDGAGGTYSLLLSSYPISTNINLSKDDLWIFNIDNEVREISIENGTIKKGKLIKDVLSKIDINKNKLIIGNQTIDFSGDIDNKDRYIFLTCELDDKISLIIEINLVAKSYSLLLSGNKNYLISNLSNTIEKINTLGLDSKNIAYNYTDESNNKYFGAISKTSQKSIIHYKKDSKNILEFYNDSTLEFNSKDFIAEDINVFMKDDINTITGKYYVDNNTDKGIDFSISLVSKNQVKVNGLYLNESVYSSYLDFVKNSDGHHNTSNFMNLFLDNISFWKLFGFENINFVIDKYFTLVGKTNLGYVEFICDNNKNIDIYFGEWKTSSSKSTIFSGNGRNVVVEPIYNPDTGEDISTSLDFSYEPLYGIDRYINKVLIAPDLYTSLININTNYYSNEYYPEIIVLNPNTFHKKVNINLDSSSFEYKWSTEGSDFILVRYLEESNKKILQKIRIKGILSNTQSFNKMSIDFKDIKKLSLGYIMSNFKSFNSENELDRDHLGFKIIDNKTYYYDEDSKLVKGLININNSLFYFDPIEFNLVTGWQTINGKKYYFDINTGAALTSYKIINGKHFYFNNDGVMQLGVFKGPDGFEYFAPANTQNNNIEGQAIVYQSKFLTLNGKKYYFDNDSKAVTGWRIINNEKYYFNPNNAIAAVGLQVIDNNKYYFNPDTAIISKGWQTVNGSRYYFDTDTAIAFNGYKTIDGKHFYFDSDCVVKIGVFSTSNGFEYFAPANTYNNNIEGQAIVYQSKFLTLNGKKYYFDNNSKAVTGWQTIDSKKYYFNTNTAEAATGWQTIDGKKYYFNTNTAEAATGWQTIDGKKYYFNTNTAIASTGYTIINGKHFYFNTDGIMQIGVFKGPNGFEYFAPANTDANNIEGQAILYQNEFLTLNGKKYYFGSDSKAVTGWRIINNKKYYFNPNNAIAAIHLCTINNDKYYFSYDGILQNGYITIERNNFYFDANNESKMVTGVFKGPNGFEYFAPANTHNNNIEGQAIVYQNKFLTLNGKKYYFDNDSKAVTGWQTIDGKKYYFNLNTAEAATGWQTIDGKKYYFNLNTAEAATGWQTIDGKKYYFNTNTFIASTGYTSINGKHFYFNTDGIMQIGVFKGPNGFEYFAPANTHNNNIEGQAILYQNKFLTLNGKKYYFGSDSKAVTGLRTIDGKKYYFNTNTAVAVTGWQTINGKKYYFNTNTSIASTGYTIISGKHFYFNTDGIMQIGVFKGPDGFEYFAPANTDANNIEGQAIRYQNRFLYLHDNIYYFGNNSKAATGWVTIDGNRYYFEPNTAMGANGYKTIDNKNFYFRNGLPQIGVFKGSNGFEYFAPANTDANNIEGQAIRYQNRFLHLLGKIYYFGNNSKAVTGWQTINGKVYYFMPDTAMAAAGGLFEIDGVIYFFGVDGVKAPGIYG

SEQ ID NO: 700 - protein, 2709 aa, synthetic construct; identical to SEQ ID NO: 675
  REGION 1..2709: note = Synthetic amino acid sequence

SEQ ID NO: 701 - protein, 2709 aa, synthetic construct
  REGION 1..2709: note = Synthetic amino acid sequence
SLISKEELIKLAYSIRPRENEYKTILTNLDEYNKLTTNNNENKYLQLKKLNESIDVFMNKYKNSSRNRALSNLKKDILKEVILIKNSNTSPVEKNLHFVWIGGEVSDIALEYIKQWADINAEYNIKLWYDSEAFLVNTLKKAIVESSTTEALQLLEEEIQNPQFDNMKFYKKRMEFIYDRQKRFVNYYKSQINKPTVPTIDDIIKSHLVSEYNRDETLLESYRTNSLRKINSNHGIDIRANSLFTEQELLNIYSQELLNRGNLAAASDIVRLLALKNFGGVYLAVAMLPGIHSDLFKTISRPSSIGLDRWEMIKLEAIMKYKKYINNYTSENFDKLDQQLKDNFKLIIESKSEKSEIFSKLENLNVSDLEIKIAFALGSVINQALISKQGSYLTNLVIEQVKNRYQFLNQHLNPAIESDNNFTDTTKIFHDSLFNSATAENSMFLTKIAPYLQVGFMPEARSTISLSGPGAYASAYYDFINLQENTIEKTLKASDLIEFKFPENNLSQLTEQEINSLWSFDQASAKYQFEKYVRDYTGGSLSEDNEVDFNKNTALDKNYLLNNKIPSNNVEEAGSKNYVHYIIQLQGDDISYEATCNLFSKNPKNSIIIQRNMNESAKSYFLSDDGESILELNKYRIPERLKNKEKVKVTFIGHGKDEFNTSEFARLSVDSLSNEISSFLDTIKLDISPKNVEVNLLGANMFSYDFNVEETYPGKLLLSIMDKITSTLPDVNKDSITIGANQYEVRINSEGRKELLAHSGKWINKEEAIMSDLSSKEYIFFDSIDNKLKAKSKNIPGLASISEDIKTLLLDTSVSPDTKFILNNLKLNIESSVGDYIYYEKLEPVKNIIHNSIDDLIDEFNLLENVSDELYELKKLNNLDEKYLISFEDISKNNSTYSVRFINKSNGESVYVETEKEIFSKYSEHITKEISTIKNSIITDVNGNLLDNIQLDHTSQVNTLNAAFFIQSLIDYSSNKDLLNDLSTSVKVQLYAQLFSTGLNTIYDSIQLVNLISNAVNDTINVLPTITEGIPIVSTILDGINLGAAIKELLDEHDPLLKKELEAKVGVLAINMSLSIAATVASIVGIGAEVTIFLLPIAGISAGIPSLVNNELILHDKATSVVNYFNHLSESKEYGPLKTEDDKILVPIDDLVISEIDFNNNAIKLGTCNILAMEGGSGHTVTGNIDHFFSSPSISSHIPSLSIYSAIGIKTENLDFSKKIMMLPNAPSRVFWWETGAVPGLRSLENNGTKLLDSIRDLYPGKFYWRFYAFFDYAITTLKPVYEDTNIKIKLDKDTRNFIMPTITTNEIRNKLSYSFDGAGGTYSLLLSSYPISTNINLSKDDLWIFNIDNEVREISIENGTIKKGKLIKDVLSKIDINKNKLIIGNQTIDFSGDIDNKDRYIFLTCELDDKISLIIEINLVAKSYSLLLSGDKNYLISNLSNTIEKINTLGLDSKNIAYNYTDESNNKYFGAISKTSQKSIIHYKKDSKNILEFYNGSTLEFNSKDFIAEDINVFMKDDINTITGKYYVDNNTDKSIDFSISLVSKNQAKVNGLYLNESVYSSYLDFVKNADGHHNTSNFMNLFLDNISFWKLFGFENINFVVDKYFTLVGKTNLGYVEFICDNNKNIDIYFGEWKTSSSKSTIFSGNGRNVVVEPIYNPDTGEDISTSLDFSYEPLYGIDRYINKVLIAPDLYTSLININTNYYSNEYYPEIIVLNPNTFHKKVNINLDSSSFEYKWSTEGSDFILVRYLEESNKKILQKIRIKGILSNTQSFNKMSIDFKDIKKLSLVYIMSNFKSFNSENELDRDHLGFKIIDNKTYYYDEASKLVKGLININNSLFYFDPIESNLVTGWQTINGKKYYFDINTGAALTSYKIINGKHFYFNNNGVMQLGVFKGPDRFEYFAPANTQNNNIEGQAIVYQSKFLTLNGKKYYFDNDSKAVTGWRIINNEKYYFNPNNAIAAVGLQVIDNNKYYFNPDTAIISKGWQTVNGSRYYFDTDTAIAFNGYKTIDGKHFYFDSDCVVKIGVFSGSNGFEYFAPANTYNNNIEGQAIVYQSKFLTLNGKKYYFDNNSKAVTGWQTIDSKKYYFNTNTAEAATGWQTIDGKKYYFNTNTAEAATGWQTIDGKKYYFNTNTSIASTGYTIINGKHFYFNTDGIMQIGVFKGPNGFEYFAPANTDANNIEGQAILYQNKFLTLNGKKYYFASDSKAVTGWRIINNKKYYFNPNNAIAATHLYTINNDKYYFSYDGILQNGYITIERNNFYFDANNESKMVTGVFKGPNGFEYFAPANTHNNNIEGQAIVYQNKFLTLNGKKYYFDNDSKAVTGWQTIDGKKYYFNLNTAVAVTGWQTIDGKKYYFNLNTAEAATGWQTIDGKKYYFNTNTFIASTGYTSINGKHFYFNTDGIMQIGVFKGPNGFEYFAPANTHNNNIEGQAILYQNKFLTLNGKKYYFASDSKAVTGLRTIDGKKYYFNTNTAVAATGWQTINGKKYYFNTNTSIASTGYTIINGKHFYFNTDGIMQIGVFKGPDGFEYFAPANTDANNIEGQAIRYQNRFLYLHDNIYYFGNNSKAATGWVTIDGRRYYFEPNTAIGANGYKIIDNKNFYFRNGLPQIGVFKGPNGFEYFAPANTDANNIDGQAIRYQNRFLHLLGNIYYFGNNSKAVTGWQTINGNMYYFMPDTAMAAAGGLFEIDGVIYFFGVDGVKAPGIYG

SEQ ID NO: 702 - protein, 2709 aa, synthetic construct; identical to SEQ ID NO: 665
  REGION 1..2709: note = Synthetic amino acid sequence

SEQ ID NO: 703 - protein, 2709 aa, synthetic construct
  REGION 1..2709: note = Synthetic amino acid sequence
SLISKEELIKLAYSIRPRENEYKTILTNLDEYNKLTTNNNENKYLQLKKLNESIDVFMNKYKNSSRNRALSNLKKDILKEVILIKNSNTSPVEKNLHFVWIGGEVSDIALEYIKQWADINAEYNIKLWYDSEAFLVNTLKKAIVESSTTEALQLLEEEIQNPQFDNMKFYKKRMEFIYDRQKRFVNYYKSQINKPTVPTIDDIIKSHLVSEYNRDETLLESYRTNSLRKINSNHGIDIRANSLFTEQELLNIYSQELLNRGNLAAASDIVRLLALKNFGGVYLAVAMLPGIHSDLFKTISRPSSIGLDRWEMIKLEAIMKYKKYINNYTSENFDKLDQQLKDNFKLIIESKSEKSEIFSKLENLNVSDLEIKIAFALGSVINQALISKQGSYLTNLVIEQVKNRYQFLNQHLNPAIESDNNFTDTTKIFHDSLFNSATAENSMFLTKIAPYLQVGFMPEARSTISLSGPGAYASAYYDFINLQENTIEKTLKASDLIEFKFPENNLSQLTEQEINSLWSFDQASAKYQFEKYVRDYTGGSLSEDNEVDFNKNTALDKNYLLNNKIPSNNVEEAGSKNYVHYIIQLQGDDISYEATCNLFSKNPKNSIIIQRNMNESAKSYFLSDDGESILELNKYRIPERLKNKEKVKVTFIGHGKDEFNTSEFARLSVDSLSNEISSFLDTIKLDISPKNVEVNLLGANMFSYDFNVEETYPGKLLLSIMDKITSTLPDVNKDSITIGANQYEVRINSEGRKELLAHSGKWINKEEAIMSDLSSKEYIFFDSIDNKLKAKSKNIPGLASISEDIKTLLLDTSVSPDTKFILNNLKLNIESSVGDYIYYEKLEPVKNIIHNSIDDLIDEFNLLENVSDELYELKKLNNLDEKYLISFEDISKNNSTYSVRFINKSNGESVYVETEKEIFSKYSEHITKEISTIKNSIITDVNGNLLDNIQLDHTSQVNTLNAAFFIQSLIDYSSNKDLLNDLSTSVKVQLYAQLFSTGLNTIYDSIQLVNLISNAVNDTINVLPTITEGIPIVSTILDGINLGAAIKELLDEHDPLLKKELEAKVGVLAINMSLSIAATVASIVGIGAEVTIFLLPIAGISAGIPSLVNNELILHDKATSVVNYFNHLSESKEYGPLKTEDDKILVPIDDLVISEIDFNNNAIKLGTCNILAMEGGSGHTVTGNIDHFFSSPSISSHIPSLSIYSAIGIKTENLDFSKKIMMLPNAPSRVFWWETGAVPGLRSLENNGTKLLDSIRDLYPGKFYWRFYAFFDYAITTLKPVYEDTNIKIKLDKDTRNFIMPTITTNEIRNKLSYSFDGAGGTYSLLLSSYPISTNINLSKDDLWIFNIDNEVREISIENGTIKKGKLIKDVLSKIDINKNKLIIGNQTIDFSGDIDNKDRYIFLTCELDDKISLIIEINLVAKSYSLLLSGDKNYLISNLSNTIEKINTLGLDSKNIAYNYTDESNNKYFGAISKTSQKSIIHYKKDSKNILEFYNGSTLEFNSKDFIAEDINVFMKDDINTITGKYYVDNNTDKSIDFSISLVSKNQAKVNGLYLNESVYSSYLDFVKNADGHHNTSNFMNLFLDNISFWKLFGFENINFVVDKYFTLVGKTNLGYVEFICDNNKNIDIYFGEWKTSSSKSTIFSGNGRNVVVEPIYNPDTGEDISTSLDFSYEPLYGIDRYINKVLIAPDLYTSLININTNYYSNEYYPEIIVLNPNTFHKKVNINLDSSSFEYKWSTEGSDFILVRYLEESNKKILQKIRIKGILSNTQSFNKMSIDFKDIKKLSLVYIMSNFKSFNSENELDRDHLGFKIIDNKTYYYDEASKLVKGLININNSLFYFDPIESNLVTGWQTINGKKYYFDINTGAALTSYKIINGKHFYFNNNGVMQLGVFKGPDRFEYFAPANTQNNNIEGQAIVYQSKFLTLNGKKYYFDNDSKAVTGWRIINNEKYYFNPNNAIAAVGLQVIDNNKYYFNPDTAIISKGWQTVNGSRYYFDTDTAIAFNGYKTIDGKHFYFDSDCVVKIGVFSGSNGFEYFAPANTYNNNIEGQAIVYQSKFLTLNGKKYYFDNNSKAVTGWQTIDSKKYYFNTNTAEAATGWQTIDGKKYYFNTNTAEAATGWQTIDGKKYYFNTNTSIASTGYTIINGKHFYFNTDGIMQIGVFKGPDGFEYFAPANTDANNIEGQAILYQNKFLTLNGKKYYFASDSKAVTGWRIINNKKYYFNPNNAIAATHLYTINNDKYYFSYDGILQNGYITIERNNFYFDANNESKMVTGVFKGPNGFEYFAPANTHNNNIEGQAIVYQNKFLTLNGKKYYFDNDSKAVTGWQTIDGKKYYFNLNTAVAVTGWQTIDGKKYYFNLNTAEAATGWQTIDGKKYYFNTNTFIASTGYTSINGKHFYFNTDGIMQIGVFKGPNGFEYFAPANTHNNNIEGQAILYQNKFLTLNGKKYYFASDSKAVTGLRTIDGKKYYFNTNTAEAATGWQTINGKKYYFNTNTSIASTGYTIINGKHFYFNTDGIMQIGVFKGPDGFEYFAPANTDANNIEGQAIRYQNRFLYLHDNIYYFGNNSKAATGWVTIDGRRYYFEPNTAIGANGYKIIDNKNFYFRNGLPQIGVFKGPNGFEYFAPANTDANNIDGQAIRYQNRFLHLLGNIYYFGNNSKAVTGWQTINGNMYYFMPDTAMAAAGGLFEIDGVIYFFGVDGVKAPGIYG

SEQ ID NO: 704 - protein, 2709 aa, synthetic construct; identical to SEQ ID NO: 675
  REGION 1..2709: note = Synthetic amino acid sequence

SEQ ID NO: 705 - protein, 2709 aa, synthetic construct
  REGION 1..2709: note = Synthetic amino acid sequence
SLISKEELIKLAYSIRPRENEYKTILTNLDEYNKLTTNNNENKYLQLKKLNESIDVFMNKYKNSSRNRALSNLKKDILKEVILIKNSNTSPVEKNLHFVWIGGEVSDIALEYIKQWADINAEYNIKLWYDSEAFLVNTLKKAIVESSTTEALQLLEEEIQNPQFDNMKFYKKRMEFIYDRQKRFVNYYKSQINKPTVPTIDDIIKSHLVSEYNRDETLLESYRTNSLRKINSNHGIDIRANSLFTEQELLNIYSQELLNRGNLAAASDIVRLLALKNFGGVYLAVAMLPGIHSDLFKTISRPSSIGLDRWEMIKLEAIMKYKKYINNYTSENFDKLDQQLKDNFKLIIESKSEKSEIFSKLENLNVSDLEIKIAFALGSVINQALISKQGSYLTNLVIEQVKNRYQFLNQHLNPAIESDNNFTDTTKIFHDSLFNSATAENSMFLTKIAPYLQVGFMPEARSTISLSGPGAYASAYYDFINLQENTIEKTLKASDLIEFKFPENNLSQLTEQEINSLWSFDQASAKYQFEKYVRDYTGGSLSEDNEVDFNKNTALDKNYLLNNKIPSNNVEEAGSKNYVHYIIQLQGDDISYEATCNLFSKNPKNSIIIQRNMNESAKSYFLSDDGESILELNKYRIPERLKNKEKVKVTFIGHGKDEFNTSEFARLSVDSLSNEISSFLDTIKLDISPKNVEVNLLGANMFSYDFNVEETYPGKLLLSIMDKITSTLPDVNKDSITIGANQYEVRINSEGRKELLAHSGKWINKEEAIMSDLSSKEYIFFDSIDNKLKAKSKNIPGLASISEDIKTLLLDTSVSPDTKFILNNLKLNIESSVGDYIYYEKLEPVKNIIHNSIDDLIDEFNLLENVSDELYELKKLNNLDEKYLISFEDISKNNSTYSVRFINKSNGESVYVETEKEIFSKYSEHITKEISTIKNSIITDVNGNLLDNIQLDHTSQVNTLNAAFFIQSLIDYSSNKDLLNDLSTSVKVQLYAQLFSTGLNTIYDSIQLVNLISNAVNDTINVLPTITEGIPIVSTILDGINLGAAIKELLDEHDPLLKKELEAKVGVLAINMSLSIAATVASIVGIGAEVTIFLLPIAGISAGIPSLVNNELILHDKATSVVNYFNHLSESKEYGPLKTEDDKILVPIDDLVISEIDFNNNAIKLGTCNILAMEGGSGHTVTGNIDHFFSSPSISSHIPSLSIYSAIGIKTENLDFSKKIMMLPNAPSRVFWWETGAVPGLRSLENNGTKLLDSIRDLYPGKFYWRFYAFFDYAITTLKPVYEDTNIKIKLDKDTRNFIMPTITTNEIRNKLSYSFDGAGGTYSLLLSSYPISTNINLSKDDLWIFNIDNEVREISIENGTIKKGKLIKDVLSKIDINKNKLIIGNQTIDFSGDIDNKDRYIFLTCELDDKISLIIEINLVAKSYSLLLSGDKNYLISNLSNTIEKINTLGLDSKNIAYNYTDESNNKYFGAISKTSQKSIIHYKKDSKNILEFYNGSTLEFNSKDFIAEDINVFMKDDINTITGKYYVDNNTDKSIDFSISLVSKNQAKVNGLYLNESVYSSYLDFVKNADGHHNTSNFMNLFLDNISFWKLFGFENINFVVDKYFTLVGKTNLGYVEFICDNNKNIDIYFGEWKTSSSKSTIFSGNGRNVVVEPIYNPDTGEDISTSLDFSYEPLYGIDRYINKVLIAPDLYTSLININTNYYSNEYYPEIIVLNPNTFHKKVNINLDSSSFEYKWSTEGSDFILVRYLEESNKKILQKIRIKGILSNTQSFNKMSIDFKDIKKLSLVYIMSNFKSFNSENELDRDHLGFKIIDNKTYYYDEASKLVKGLININNSLFYFDPIESNLVTGWQTINGKKYYFDINTGAALTSYKIINGKHFYFNNNGVMQLGVFKGPDRFEYFAPANTQNNNIEGQAIVYQSKFLTLNGKKYYFDNDSKAVTGWRIINNEKYYFNPNNAIAAVGLQVIDNNKYYFNPDTAIISKGWQTVNGSRYYFDTDTAIAFNGYKTIDGKHFYFDSDCVVKIGVFSGSNGFEYFAPANTYNNNIEGQAIVYQSKFLTLNGKKYYFDNNSKAVTGWQTIDSKKYYFNTNTAEAATGWQTIDGKKYYFNTNTAEAATGWQTIDGKKYYFNTNTSIASTGYTIINGKHFYFNTDGIMQIGVFKGPNGFEYFAPANTDANNIEGQAILYQNKFLTLNGKKYYFASDSKAVTGWRIINNKKYYFNPNNAIAATHLYTINNDKYYFSYDGILQNGYITIERNNFYFDANNESKMVTGVFKGPNGFEYFAPANTHNNNIEGQAIVYQNKFLTLNGKKYYFDNDSKAVTGWQTIDGKKYYFNLNTAVAVTGWQTIDGKKYYFNLNTAEAATGWQTIDGKKYYFNTNTFIASTGYTSINGKHFYFNTDGIMQIGVFKGPNGFEYFAPANTHNNNIEGQAILYQNKFLTLNGKKYYFASDSKAVTGLRTIDGKKYYFNTNTAVAVTGWQTINGKKYYFNTNTSIASTGYTIISGKHFYFNTDGIMQIGVFKGPDGFEYFAPANTDANNIEGQAIRYQNRFLYLHDNIYYFGNNSKAATGWVTIDGRRYYFEPNTAIGANGYKIIDNKNFYFRNGLPQIGVFKGPNGFEYFAPANTDANNIEGQAIRYQNRFLHLLGNIYYFGNNSKAVTGWQTINGNMYYFMPDTAMAAAGGLFEIDGVIYFFGVDGVKAPGIYG

SEQ ID NO: 706 - protein, 2709 aa, synthetic construct
  REGION 1..2709: note = Synthetic amino acid sequence
SLISKEELIKLAYSIRPRENEYKTILTNLDEYNKLTTNNNENKYLQLKKLNESIDVFMNKYKNSSRNRALSNLKKDILKEVILIKNSNTSPVEKNLHFVWIGGEVSDIALEYIKQWADINAEYNIKLWYDSEAFLVNTLKKAIVESSTTEALQLLEEEIQNPQFDNMKFYKKRMEFIYDRQKRFVNYYKSQINKPTVPTIDDIIKSHLVSEYNRDETLLESYRTNSLRKINSNHGIDIRANSLFTEQELLNIYSQELLNRGNLAAASDIVRLLALKNFGGVYLAVAMLPGIHSDLFKTISRPSSIGLDRWEMIKLEAIMKYKKYINNYTSENFDKLDQQLKDNFKLIIESKSEKSEIFSKLENLNVSDLEIKIAFALGSVINQALISKQGSYLTNLVIEQVKNRYQFLNQHLNPAIESDNNFTDTTKIFHDSLFNSATAENSMFLTKIAPYLQVGFMPEARSTISLSGPGAYASAYYDFINLQENTIEKTLKASDLIEFKFPENNLSQLTEQEINSLWSFDQASAKYQFEKYVRDYTGGSLSEDNEVDFNKNTALDKNYLLNNKIPSNNVEEAGSKNYVHYIIQLQGDDISYEATCNLFSKNPKNSIIIQRNMNESAKSYFLSDDGESILELNKYRIPERLKNKEKVKVTFIGHGKDEFNTSEFARLSVDSLSNEISSFLDTIKLDISPKNVEVNLLGANMFSYDFNVEETYPGKLLLSIMDKITSTLPDVNKDSITIGANQYEVRINSEGRKELLAHSGKWINKEEAIMSDLSSKEYIFFDSIDNKLKAKSKNIPGLASISEDIKTLLLDTSVSPDTKFILNNLKLNIESSVGDYIYYEKLEPVKNIIHNSIDDLIDEFNLLENVSDELYELKKLNNLDEKYLISFEDISKNNSTYSVRFINKSNGESVYVETEKEIFSKYSEHITKEISTIKNSIITDVNGNLLDNIQLDHTSQVNTLNAAFFIQSLIDYSSNKDLLNDLSTSVKVQLYAQLFSTGLNTIYDSIQLVNLISNAVNDTINVLPTITEGIPIVSTILDGINLGAAIKELLDEHDPLLKKELEAKVGVLAINMSLSIAATVASIVGIGAEVTIFLLPIAGISAGIPSLVNNELILHDKATSVVNYFNHLSESKEYGPLKTEDDKILVPIDDLVISEIDFNNNAIKLGTCNILAMEGGSGHTVTGNIDHFFSSPSISSHIPSLSIYSAIGIKTENLDFSKKIMMLPNAPSRVFWWETGAVPGLRSLENNGTKLLDSIRDLYPGKFYWRFYAFFDYAITTLKPVYEDTNIKIKLDKDTRNFIMPTITTNEIRNKLSYSFDGAGGTYSLLLSSYPISTNINLSKDDLWIFNIDNEVREISIENGTIKKGKLIKDVLSKIDINKNKLIIGNQTIDFSGDIDNKDRYIFLTCELDDKISLIIEINLVAKSYSLLLSGDKNYLISNLSNTIEKINTLGLDSKNIAYNYTDESNNKYFGAISKTSQKSIIHYKKDSKNILEFYNGSTLEFNSKDFIAEDINVFMKDDINTITGKYYVDNNTDKSIDFSISLVSKNQAKVNGLYLNESVYSSYLDFVKNADGHHNTSNFMNLFLDNISFWKLFGFENINFVVDKYFTLVGKTNLGYVEFICDNNKNIDIYFGEWKTSSSKSTIFSGNGRNVVVEPIYNPDTGEDISTSLDFSYEPLYGIDRYINKVLIAPDLYTSLININTNYYSNEYYPEIIVLNPNTFHKKVNINLDSSSFEYKWSTEGSDFILVRYLEESNKKILQKIRIKGILSNTQSFNKMSIDFKDIKKLSLVYIMSNFKSFNSENELDRDHLGFKIIDNKTYYYDEASKLVKGLININNSLFYFDPIESNLVTGWQTINGKKYYFDINTGAALTSYKIINGKHFYFNNNGVMQLGVFKGPDRFEYFAPANTQNNNIEGQAIVYQSKFLTLNGKKYYFDNDSKAVTGWRIINNEKYYFNPNNAIAAVGLQVIDNNKYYFNPDTAIISKGWQTVNGSRYYFDTDTAIAFNGYKTIDGKHFYFDSDCVVKIGVFSGSNGFEYFAPANTYNNNIEGQAIVYQSKFLTLNGKKYYFDNNSKAVTGWQTIDSKKYYFNTNTAEAATGWQTIDGKKYYFNTNTAEAATGWQTIDGKKYYFNTNTSIASTGYTIINGKHFYFNTDGIMQIGVFKGPDGFEYFAPANTDANNIEGQAILYQNKFLTLNGKKYYFASDSKAVTGWRIINNKKYYFNPNNAIAATHLYTINNDKYYFSYDGILQNGYITIERNNFYFDANNESKMVTGVFKGPNGFEYFAPANTHNNNIEGQAIVYQNKFLTLNGKKYYFDNDSKAVTGWQTIDGKKYYFNLNTAVAVTGWQTIDGKKYYFNLNTAEAATGWQTIDGKKYYFNTNTFIASTGYTSINGKHFYFNTDGIMQIGVFKGPNGFEYFAPANTHNNNIEGQAILYQNKFLTLNGKKYYFASDSKAVTGLRTIDGKKYYFNTNTAVAVTGWQTINGKKYYFNTNTSIASTGYTIINGKHFYFNTDGIMQIGVFKGPDGFEYFAPANTDANNIEGQAIRYQNRFLYLHDNIYYFGNNSKAATGWVTIDGRRYYFEPNTAIGANGYKIIDNKNFYFRNGLPQIGVFKGPNGFEYFAPANTDANNIDGQAIRYQNRFLHLLGNIYYFGNNSKAVTGWQTINGNMYYFMPDTAMAAAGGLFEIDGVIYFFGVDGVKAPGIYG

SEQ ID NO: 707 - protein, 2709 aa, synthetic construct; identical to SEQ ID NO: 672
  REGION 1..2709: note = Synthetic amino acid sequence

SEQ ID NO: 708 - protein, 2709 aa, synthetic construct; identical to SEQ ID NO: 690
  REGION 1..2709: note = Synthetic amino acid sequence

SEQ ID NO: 709 - protein, 2709 aa, synthetic construct; identical to SEQ ID NO: 706
  REGION 1..2709: note = Synthetic amino acid sequence

SEQ ID NO: 710 - protein, 2709 aa, synthetic construct
  REGION 1..2709: note = Synthetic amino acid sequence
SLISKEELIKLAYSIRPRENEYKTILTNLDEYNKLTTNNNENKYLQLKKLNESIDVFMNKYKTSSRNRALSNLKKDILKEVILIKNSNTSPVEKNLHFVWIGGEVSDIALEYIKQWADINAEYNIKLWYDSEAFLVNTLKKAIVESSTTEALQLLEEEIQNPQFDNMKFYKKRMEFIYDRQKRFINYYKSQINKPTVPTIDDIIKSHLVSEYNRDETVLESYRTNSLRKINSNHGIDIRANSLFTEQELLNIYSQELLNRGNLAAASDIVRLLALKNFGGVYLAVAMLPGIHSDLFKTISRPSSIGLDRWEMIKLEAIMKYKKYINNYTSENFDKLDQQLKDNFKLIIESKSEKSEIFSKLENLNVSDLEIKIAFALGSVINQALISKQGSYLTNLVIEQVKNRYQFLNQHLNPAIESDNNFTDTTKIFHDSLFNSATAENSMFLTKIAPYLQVGFMPEARSTISLSGPGAYASAYYDFINLQENTIEKTLKASDLIEFKFPENNLSQLTEQEINSLWSFDQASAKYQFEKYVRDYTGGSLSEDNGVDFNKNTALDKNYLLNNKIPSNNVEEAGSKNYVHYIIQLQGDDISYEATCNLFSKNPKNSIIIQRNMNESAKSYFLSDDGESILELNKYRIPERLKNKEKVKVTFIGHGKDEFNTSEFARLSVDSLSNEISSFLDTIKLDISPKNVEVNLLGANMFSYDFNVEETYPGKLLLSIMDKITSTLPDVNKNSITIGANQYEVRINSEGRKELLAHSGKWINKEEAIMSDLSSKEYIFFDSIDNKLKAKSKNIPGLASISEDIKTLLLDASVSPDTKFILNNLKLNIESSIGDYIYYEKLEPVKNIIHNSIDDLIDEFNLLENVSDELYELKKLNNLDEKYLISFEDISKNNSTYSVRFINKSNGESVYVETEKEIFSKYSEHITKEISTIKNSIITDVNGNLLDNIQLDHTSQVNTLNAAFFIQSLIDYSSNKDVLNDLSTSVKVQLYAQLFSTGLNTIYDSIQLVNLISNAVNDTINVLPTITEGIPIVSTILDGINLGAAIKELLDEHDPLLKKELEAKVGVLAINMSLSIAATVASIVGIGAEVTIFLLPIAGISAGIPSLVNNELILHDKATSVVNYFNHLSESKKYGPLKTEDDKILVPIDDLVISEIDFNNNSIKLGTCNILAMEGGSGHTVTGNIDHFFSSPSISSHIPSLSIYSAIGIETENLDFSKKIMMLPNAPSRVFWWETGAVPGLRSLENDGTRLLDSIRDLYPGKFYWRFYAFFDYAITTLKPVYENTNIKIKLDKDTRNFIMPTITTNEIRNKLSYSFDGAGGTYSLLLSSYPISTNINLSKDDLWIFNIDNEVREISIENGTIKKGKLIKDVLSKIDINKNKLIIGNQTIDFSGDIDNKDRYIFLTCELDDKISLIIEINLVAKSYSLLLSGDKNYLISNLSNTIEKINTLGLDSKNIAYNYTDESNNKYFGAISKTSQKSIIHYKKDSKNILEFYNDSTLEFNSKDFIAEDINVFMKDDINTITGKYYVDNNTDKSIDFSISLVSKNQVKVNGLYLNESVYSSYLDFVKNSDGHHNTSNFMNLFLDNISFWKLFGFENINFVIDKYFTLVGKTNLGYVEFICDNNKNIDIYFGEWKTSSSKSTIFSGNGRNVVVEPIYNPDTGEDISTSLDFSYEPLYGIDRYINKVLIAPDLYTSLININTNYYSNEYYPEIIVLNPNTFHKKVNINLDSSSFEYKWSTEGSDFILVRYLEESNKKILQKIRIKGILSNTQSFNKMSIDFKDIKKLSLGYIMSNFKSFNSENELDRDHLGFKIIDNKTYYYDEDSKLVKGLININNSLFYFDPIEFNLVTGWQTINGKKYYFDINTGAALTSYKIINGKHFYFNNDGVMQLGVFKGPDGFEYFAPANTQNNNIEGQAIVYQSKFLTLNGKKYYFDNDSKAVTGWRIINNEKYYFNPNNAIAAVGLQVIDNNKYYFNPDTAIISKGWQTVNGSRYYFDTDTAIAFNGYKTIDGKHFYFDSDCVVKIGVFSTSNGFEYFAPANTYNNNIEGQAIVYQSKFLTLNGKKYYFDDNSKAVTGWQTIDSKKYYFNTNTAEAATGWQTIDGKKYYFNTNTAEAATGWQTIDGKKYYFNTNTSIASTGYTSINGKHFYFNTDGIMQIGVFKGPNGFEYFAPANTDANNIEGQAILYQNEFLTLNGKKYYFGSDSKAVTGWRIINNKKYYFNPNNAIAAIHLCTINNDKYYFSYDGILQNGYITIERNNFYFDANNESKMVTGVFKGPNGFEYFAPANTHNNNIEGQAIVYQNKFLTLNGKKYYFDNDSKAVTGWQTIDGKKYYFNLNTAEAATGWQTIDGKKYYFNLNTAEAATGWQTIDGKKYYFNTNTFIASTGYTSINGKHFYFNTDGIMQIGVFKGPNGFEYFAPANTHNNNIEGQAILYQNKFLTLNGKKYYFGSDSKAVTGLRTIDGKKYYFNTNTAVAVTGWQTINGKKYYFNTNTSIASTGYTIISGKHFYFNTDGIMQIGVFKGPDGFEYFAPANTDANNIEGQAIRYQNRFLYLHDNIYYFGNNSKAATGWVTIDGNRYYFEPNTAMGANGYKTIDNKNFYFRNGLPQIGVFKGSNGFEYFAPANTDANNIEGQAIRYQNRFLHLLGKIYYFGNNSKAVTGWQTINGKVYYFMPDTAMAAAGGLFEIDGVIYFFGVDGVKAPGIYG

SEQ ID NO: 711 - protein, 2709 aa, synthetic construct
  REGION 1..2709: note = Synthetic amino acid sequence
SLISKEELIKLAYSIRPRENEYKTILTNLDEYNKLTTNNNENKYLQLKKLNESIDVFMNKYKTSSRNRALSNLKKDILKEVILIKNSNTSPVEKNLHFVWIGGEVSDIALEYIKQWADINAEYNIKLWYDSEAFLVNTLKKAIVESSTTEALQLLEEEIQNPQFDNMKFYKKRMEFIYDRQKRFINYYKSQINKPTVPTIDDIIKSHLVSEYNRDETVLESYRTNSLRKINSNHGIDIRANSLFTEQELLNIYSQELLNRGNLAAASDIVRLLALKNFGGVYLAVAMLPGIHSDLFKTISRPSSIGLDRWEMIKLEAIMKYKKYINNYTSENFDKLDQQLKDNFKLIIESKSEKSEIFSKLENLNVSDLEIKIAFALGSVINQALISKQGSYLTNLVIEQVKNRYQFLNQHLNPAIESDNNFTDTTKIFHDSLFNSATAENSMFLTKIAPYLQVGFMPEARSTISLSGPGAYASAYYDFINLQENTIEKTLKASDLIEFKFPENNLSQLTEQEINSLWSFDQASAKYQFEKYVRDYTGGSLSEDNGVDFNKNTALDKNYLLNNKIPSNNVEEAGSKNYVHYIIQLQGDDISYEATCNLFSKNPKNSIIIQRNMNESAKSYFLSDDGESILELNKYRIPERLKNKEKVKVTFIGHGKDEFNTSEFARLSVDSLSNEISSFLDTIKLDISPKNVEVNLLGANMFSYDFNVEETYPGKLLLSIMDKITSTLPDVNKNSITIGANQYEVRINSEGRKELLAHSGKWINKEEAIMSDLSSKEYIFFDSIDNKLKAKSKNIPGLASISEDIKTLLLDASVSPDTKFILNNLKLNIESSIGDYIYYEKLEPVKNIIHNSIDDLIDEFNLLENVSDELYELKKLNNLDEKYLISFEDISKNNSTYSVRFINKSNGESVYVETEKEIFSKYSEHITKEISTIKNSIITDVNGNLLDNIQLDHTSQVNTLNAAFFIQSLIDYSSNKDVLNDLSTSVKVQLYAQLFSTGLNTIYDSIQLVNLISNAVNDTINVLPTITEGIPIVSTILDGINLGAAIKELLDEHDPLLKKELEAKVGVLAINMSLSIAATVASIVGIGAEVTIFLLPIAGISAGIPSLVNNELILHDKATSVVNYFNHLSESKKYGPLKTEDDKILVPIDDLVISEIDFNNNSIKLGTCNILAMEGGSGHTVTGNIDHFFSSPSISSHIPSLSIYSAIGIETENLDFSKKIMMLPNAPSRVFWWETGAVPGLRSLENDGTRLLDSIRDLYPGKFYWRFYAFFDYAITTLKPVYEDTNIKIKLDKDTRNFIMPTITTNEIRNKLSYSFDGAGGTYSLLLSSYPISTNINLSKDDLWIFNIDNEVREISIENGTIKKGKLIKDVLSKIDINKNKLIIGNQTIDFSGDIDNKDRYIFLTCELDDKISLIIEINLVAKSYSLLLSGDKNYLISNLSNTIEKINTLGLDSKNIAYNYTDESNNKYFGAISKTSQKSIIHYKKDSKNILEFYNDSTLEFNSKDFIAEDINVFMKDDINTITGKYYVDNNTDKSIDFSISLVSKNQVKVNGLYLNESVYSSYLDFVKNSDGHHNTSNFMNLFLDNISFWKLFGFENINFVIDKYFTLVGKTNLGYVEFICDNNKNIDIYFGEWKTSSSKSTIFSGNGRNVVVEPIYNPDTGEDISTSLDFSYEPLYGIDRYINKVLIAPDLYTSLININTNYYSNEYYPEIIVLNPNTFHKKVNINLDSSSFEYKWSTEGSDFILVRYLEESNKKILQKIRIKGILSNTQSFNKMSIDFKDIKKLSLGYIMSNFKSFNSENELDRDHLGFKIIDNKTYYYDEDSKLVKGLININNSLFYFDPIEFNLVTGWQTINGKKYYFDINTGAALTSYKIINGKHFYFNNDGVMQLGVFKGPDGFEYFAPANTQNNNIEGQAIVYQSKFLTLNGKKYYFDNNSKAVTGWRIINNEKYYFNPNNAIAAVGLQVIDNNKYYFNPDTAIISKGWQTVNGSRYYFDTDTAIAFNGYKTIDGKHFYFDSDCVVKIGVFSTSNGFEYFAPANTYNNNIEGQAIVYQSKFLTLNGKKYYFDNNSKAVTGLQTIDSKKYYFNTNTAEAATGWQTIDGKKYYFNTNTAEAATGWQTIDGKKYYFNTNTAIASTGYTIINGKHFYFNTDGIMQIGVFKGPNGFEYFAPANTDANNIEGQAILYQNEFLTLNGKKYYFGSDSKAVTGWRIINNKKYYFNPNNAIAAIHLCTINNDKYYFSYDGILQNGYITIERNNFYFDANNESKMVTGVFKGPNGFEYFAPANTHNNNIEGQAIVYQNKFLTLNGKKYYFDNDSKAVTGWQTIDGKKYYFNLNTAEAATGWQTIDGKKYYFNLNTAEAATGWQTIDGKKYYFNTNTFIASTGYTSINGKHFYFNTDGIMQIGVFKGPNGFEYFAPANTDANNIEGQAILYQNKFLTLNGKKYYFGSDSKAVTGLRTIDGKKYYFNTNTAVAVTGWQTINGKKYYFNTNTSIASTGYTIISGKHFYFNTDGIMQIGVFKGPDGFEYFAPANTDANNIEGQAIRYQNRFLYLHDNIYYFGNNSKAATGWVTIDGNRYYFEPNTAMGANGYKTIDNKNFYFRNGLPQIGVFKGSNGFEYFAPANTDANNIEGQAIRYQNRFLHLLGKIYYFGNNSKAVTGWQTINGKVYYFMPDTAMAAAGGLFEIDGVIYFFGVDGVKAPGIYG

SEQ ID NO: 712 - protein, 2365 aa, synthetic construct
  REGION 1..2365: note = Synthetic amino acid sequence
SLVNRKQLEKMANVRFRVQEDEYVAILDALEEYHNMSENTVVEKYLKLKDINSLTDIYIDTYKKSGRNKALKKFKEYLVTEVLELKNNNLTPVEKNLHFVWIGGQINDTAINYINQWKDVNSDYNVNVFYDSNAFLINTLKKTIVESATNDTLESFRENLNDPRFDYNKFYRKRMEIIYDKQKNFINYYKTQREENPDLIIDDIVKIYLSNEYSKDIDELNSYIEESLNKVTENSGNDVRNFEEFKGGESFKLYEQELVERWNLAAASDILRISALKEVGGVYLAVAMLPGIQPDLFESIEKPSSVTVDFWEMVKLEAIMKYKEYIPGYTSEHFDMLDEEVQSSFESVLASKSDKSEIFSSLGDMEASPLEVKIAFNSKGIINQGLISVKDSYCSNLIVKQIENRYKILNNSLNPAISEDNDFNTTTNAFIDSIMAEANADNGRFMMELGKYLRVGFFPDVKTTINLSGPEAYAAAYQDLLMFKEGSMNIHLIEADLRNFEISKTNISQSTEQEMASLWSFDDARAKAQFEEYKKNYFEGSLGEDDNLDFSQNTVVDKEYLLEKISSLARSSERGYIHYIVQLQGDKISYEAACNLFAKTPYDSVLFQKNIEDSEIAYYYNPGDGEIQEIDKYKIPSIISDRPKIKLTFIGHGKDEFNTDIFAGLDVDSLSTEIETAIDLAKEDISPKSIEINLLGANMFSYSVNVEETYPGKLLLRVKDKVSELMPSISQDSIIVSANQYEVRINSEGRRELLDHSGEWINKEESIIKDISSKEYISFNPKENKIIVKSKNLPELSTLLQEIRNNSNSSDIELEEKVMLAECEINVISNIDTQVVEGRIEEAKSLTSDSINYIKNEFKLIESISDALYDLKQQNELEESHFISFEDILETDEGFSIRFIDKETGESIFVETEKAIFSEYANHITEEISKIKGTIFDTVNGKLVKKVNLDATHEVNTLNAAFFIQSLIEYNSSKESLSNLSVAMKVQVYAQLFSTGLNTITDAAKVVELVSTALDETIDLLPTLSEGLPVIATIIDGVSLGAAIKELSETSDPLLRQEIEAKIGIMAVNLTAATTAIITSSLGIASGFSILLVPLAGISAGIPSLVNNELILRDKATKVVDYFSHISLAESEGAFTSLDDKIMMPQDDLVISEIDFNNNSITLGKCEIWRMEGGSGHTVTDDIDHFFSAPSITYREPHLSIYDVLEVQKEELDLSKDLMVLPNAPNRVFAWETGWTPGLRSLENDGTKLLDRIRDNYEGEFYWRYFAFIADALITTLKPRYEDTNIRINLDSNTRSFIVPVITTEYIREKLSYSFYGSGGTYALSLSQYNMNINIELNENDTWVIDVDNVVRDVTIESDKIKKGDLIENILSKLSIEDNKIILDNHEINFSGTLNGGNGFVSLTFSILEGINAVIEVDLLSKSYKVLISGELKTLMANSNSVQQKIDYIGLNSELQKNIPYSFMDDKGKENGFINCSTKEGLFVSELSDVVLISKVYMDNSKPLFGYCSNDLKDVKVITKDDVIILTGYYLKDDIKISLSFTIQDENTIKLNGVYLDENGVAEILKFMNKKGSTNTSDSLMSFLESMNIKSIFINSLQSNTKLILDTNFIISGTTSIGQFEFICDKDNNIQPYFIKFNTLETKYTLYVGNRQNMIVEPNYDLDDSGDISSTVINFSQKYLYGIDSCVNKVIISPNIYTDEINITPIYEANNTYPEVIVLDTNYISEKINININDLSIRYVWSNDGSDFILMSTDEENKVSQVKIRFTNVFKGNTISDKISFNFSDKQDVSINKVISTFTPSYYVEGLLNYDLGLISLYNEKFYINNFGMMVSGLVYINDSLYYFKPPIKNLITGFTTIGDDKYYFNPDNGGAASVGETIIDGKNYYFSQNGVLQTGVFSTEDGFKYFAPADTLDENLEGEAIDFTGKLTIDENVYYFGDNYRAAIEWQTLDDEVYYFSTDTGRAFKGLNQIGDDKFYFNSDGIMQKGFVNINDKTFYFDDSGVMKSGYTEIDGKYFYFAENGEMQIGVFNTADGFKYFAHHDEDLGNEEGEALSYSGILNFNNKIYYFDDSFTAVVGWKDLEDGSKYYFDEDTAEAYIGISIINDGKYYFNDSGIMQIGFVTINNEVFYFSDSGIVESGMQNIDDNYFYIDENGLVQIGVFDTSDGYKYFAPANTVNDNIYGQAVEYSGLVRVGEDVYYFGETYTIETGWIYDMENESDKYYFDPETKKAYKGINVIDDIKYYFDENGIMRTGLITFEDNHYYFNEDGIMQYGYLNIEDKTFYFSEDGIMQIGVFNTPDGFKYFAHQNTLDENFEGESINYTGWLDLDEKRYYFTDEYIAATGSVIIDGEEYYFDPDTAQLVISE

SEQ ID NO: 713 - protein, 2365 aa, synthetic construct
  REGION 1..2365: note = Synthetic amino acid sequence
SLVNRKQLEKMANVRFRTQEDEYVAILDALEEYHNMSENTVVEKYLKLKDINSLTDIYIDTYKKSGRNKALKKFKEYLVTEVLELKNNNLTPVEKNLHFVWIGGQINDTAINYINQWKDVNSDYNVNVFYDSNAFLINTLKKTVVESAINDTLESFRENLNDPRFDYNKFFRKRMEIIYDKQKNFINYYKAQREENPELIIDDIVKTYLSNEYSKEIDELNTYIEESLNKITQNSGNDVRNFEEFKNGESFNLYEQELVERWNLAAASDILRISALKEIGGMYLAVAMLPGIQPDLFESIEKPSSVTVDFWEMTKLEAIMKYKEYIPEYTSEHFDMLDEEVQSSFESVLASKSDKSEIFSSLGDMEASPLEVKIAFNSKGIINQGLISVKDSYCSNLIVKQIENRYKILNNSLNPAISEDNDFNTTTNTFIDSIMAEANADNGRFMMELGKYLRVGFFPDVKTTINLSGPEAYAAAYQDLLMFKEGSMNIHLIEADLRNFEISKTNISQSTEQEMASLWSFDDARAKAQFEEYKRNYFEGSLGEDDNLDFSQNIVVDKEYLLEKISSLARSSERGYIHYIVQLQGDKISYEAACNLFAKTPYDSVLFQKNIEDSEIAYYYNPGDGEIQEIDKYKIPSIISDRPKIKLTFIGHGKDEFNTDIFAGFDVDSLSTEIEAAIDLAKEDISPKSIEINLLGANMFSYSINVEETYPGKLLLKVKDKISELMPSISQDSIIVSANQYEVRINSEGRRELLDHSGEWINKEESIIKDISSKEYISFNPKENKITVKSKNLPELSTLLQEIRNNSNSSDIELEEKVMLTECEINVISNIDTQIVEERIEEAKNLTSDSINYIKDEFKLIESISDALCDLKQQNELEDSHFISFEDISETDEGFSIRFINKETGESIFVETEKTIFSEYANHITEEISKIKGTIFDTVNGKLVKKVNLDTTHEVNTLNAAFFIQSLIEYNSSKESLSNLSVAMKVQVYAQLFSTGLNTITDAAKVVELVSTALDETIDLLPTLSEGLPIIATIIDGVSLGAAIKELSETSDPLLRQEIEAKIGIMAVNLTTATTAIITSSLGVASGFSILLVPLAGISAGIPSLVNNELVLRDKATKVVDYFKHVSLVETEGVFTLLDDKIMMPQDDLVISEIDFNNNSIVLGKCEIWRMEGGSGHTVTDDIDHFFSAPSITYREPHLSIYDVLEVQKEELDLSKDLMVLPNAPNRVFAWETGWTPGLRSLENDGTKLLDRIRDNYEGEFYWRYFAFIADALITTLKPRYEDTNIRINLDSNTRSFIVPIITTEYIREKLSYSFYGSGGTYALSLSQYNMGINIELSESDVWIIDVDNVVRDVTIESDKIKKGDLIEGILSTLSIEENKIILNSHEINFSGEVNGSNGFVSLTFSILEGINAIIEVDLLSKSYKLLISGELKILMLNSNHIQQKIDYIGFNSELQKNIPYSFVDSEGKENGFINGSTKEGLFVSELPDVVLISKVYMDDSKPSFGYYSNNLKDVKVITKDNVNILTGYYLKDDIKISLSLTLQDEKTIKLNSVHLDESGVAEILKFMNRKGNTNTSDSLMSFLESMNIKSIFVNFLQSNIKFILDANFIISGTTSIGQFEFICDENDNIQPYFIKFNTLETNYTLYVGNRQNMIVEPNYDLDDSGDISSTVINFSQKYLYGIDSCVNKVVISPNIYTDEINITPVYETNNTYPEVIVLDANYINEKINVNINDLSIRYVWSNDGNDFILMSTSEENKVSQVKIRFVNVFKDKTLANKLSFNFSDKQDVPVSEIILSFTPSYYEDGLIGYDLGLVSLYNEKFYINNFGMMVSGLIYINDSLYYFKPPVNNLITGFVTVGDDKYYFNPINGGAASIGETIIDDKNYYFNQSGVLQTGVFSTEDGFKYFAPANTLDENLEGEAIDFTGKLIIDENIYYFDDNYRGAVEWKELDGEMHYFSPETGKAFKGLNQIGDYKYYFNSDGVMQKGFVSINDNKHYFDDSGVMKVGYTEIDGKHFYFAENGEMQIGVFNTEDGFKYFAHHNEDLGNEEGEEISYSGILNFNNKIYYFDDSFTAVVGWKDLEDGSKYYFDEDTAEAYIGLSLINDGQYYFNDDGIMQVGFVTINDKVFYFSDSGIIESGVQNIDDNYFYIDDNGIVQIGVFDTSDGYKYFAPANTVNDNIYGQAVEYSGLVRVGEDVYYFGETYTIETGWIYDMENESDKYYFNPETKKACKGINLIDDIKYYFDEKGIMRTGLISFENNNYYFNENGEMQFGYINIEDKMFYFGEDGVMQIGVFNTPDGFKYFAHQNTLDENFEGESINYTGWLDLDEKRYYFTDEYIAATGSVIIDGEEYYFDPDTAQLVISE

SEQ ID NO: 714 - protein, 2365 aa, synthetic construct; identical to SEQ ID NO: 712
  REGION 1..2365: note = Synthetic amino acid sequence

SEQ ID NO: 715 - protein, 2365 aa, synthetic construct; identical to SEQ ID NO: 713
  REGION 1..2365: note = Synthetic amino acid sequence

SEQ ID NO: 716 - protein, 2365 aa, synthetic construct
  REGION 1..2365: note = Synthetic amino acid sequence
SLVNRKQLEKMANVRFRTQEDEYVAILDALEEYHNMSENTVVEKYLKLKDINSLTDIYIDTYKKSGRNKALKKFKEYLVTEVLELKNNNLTPVEKNLHFVWIGGQINDTAINYINQWKDVNSDYNVNVFYDSNAFLINTLKKTVVESAINDTLESFRENLNDPRFDYNKFFRKRMEIIYDKQKNFINYYKAQREENPELIIDDIVKTYLSNEYSKEIDELNTYIEESLNKITQNSGNDVRNFEEFKNGESFNLYEQELVERWNLAAASDILRISALKEIGGMYLAVAMLPGIQPDLFESIEKPSSVTVDFWEMTKLEAIMKYKEYIPEYTSEHFDMLDEEVQSSFESVLASKSDKSEIFSSLGDMEASPLEVKIAFNSKGIINQGLISVKDSYCSNLIVKQIENRYKILNNSLNPAISEDNDFNTTTNTFIDSIMAEANADNGRFMMELGKYLRVGFFPDVKTTINLSGPEAYAAAYQDLLMFKEGSMNIHLIEADLRNFEISKTNISQSTEQEMASLWSFDDARAKAQFEEYKRNYFEGSLGEDDNLDFSQNIVVDKEYLLEKISSLARSSERGYIHYIVQLQGDKISYEAACNLFAKTPYDSVLFQKNIEDSEIAYYYNPGDGEIQEIDKYKIPSIISDRPKIKLTFIGHGKDEFNTDIFAGFDVDSLSTEIEAAIDLAKEDISPKSIEINLLGANMFSYSINVEETYPGKLLLKVKDKISELMPSISQDSIIVSANQYEVRINSEGRRELLDHSGEWINKEESIIKDISSKEYISFNPKENKITVKSKNLPELSTLLQEIRNNSNSSDIELEEKVMLTECEINVISNIDTQIVEERIEEAKNLTSDSINYIKDEFKLIESISDALCDLKQQNELEDSHFISFEDISETDEGFSIRFINKETGESIFVETEKTIFSEYANHITEEISKIKGTIFDTVNGKLVKKVNLDTTHEVNTLNAAFFIQSLIEYNSSKESLSNLSVAMKVQVYAQLFSTGLNTITDAAKVVELVSTALDETIDLLPTLSEGLPIIATIIDGVSLGAAIKELSETSDPLLRQEIEAKIGIMAVNLTTATTAIITSSLGIASGFSILLVPLAGISAGIPSLVNNELVLRDKATKVVDYFKHVSLVETEGVFTLLDDKIMMPQDDLVISEIDFNNNSIVLGKCEIWRMEGGSGHTVTDDIDHFFSAPSITYREPHLSIYDVLEVQKEELDLSKDLMVLPNAPNRVFAWETGWTPGLRSLENDGTKLLDRIRDNYEGEFYWRYFAFIADALITTLKPRYEDTNIRINLDSNTRSFIVPIITTEYIREKLSYSFYGSGGTYALSLSQYNMGINIELSESDVWIIDVDNVVRDVTIESDKIKKGDLIEGILSTLSIEENKIILNSHEINFSGEVNGSNGFVSLTFSILEGINAIIEVDLLSKSYKLLISGELKILMLNSNHIQQKIDYIGFNSELQKNIPYRFVDSEGKENGFINGSTKEGLFVSELPDVVLISKVYMDDSKPSFGYYSNNLKDVKVITKDNVNILTGYYLKDDIKISLSLTLQDEKTIKLNSVHLDESGVAEILKFMNRKGNTNTSDSLMSFLESMNIKSIFVNFLQSNIKFILDANFIISGTTSIGQFEFICDENDNIQPYFIKFNTLETNYTLYVGNRQNMIVEPNYDLDDSGDISSTVINFSQKYLYGIDSCVNKVVISPNIYTDEINITPVYETNNTYPEVIVLDANYINEKINVNINDLSIRYVWSNDGNDFILMSTSEENKVSQVKIRFVNVFKDKTLANKLSFNFSDKQDVPVSEIILSFTPSYYEDGLIGYDLGLVSLYNEKFYINNFGMMVSGLIYINDSLYYFKPPVNNLITGFVTVGDDKYYFNPINGGAASIGETIIDDKNYYFNQSGVLQTGVFSTEDGFKYFAPANTLDENLEGEAIDFTGKLIIDENIYYFDDNYRGAVEWKELDGEMHYFSPETGKAFKGLNQIGDDKYYFNSDGVMQKGFVSINDNKHYFDDSGVMKVGYTEIDGKHFYFAENGEMQIGVFNTEDGFKYFAHHNEDLGNEEGEEISYSGILNFNNKIYYFDDSFTAVVGWKDLEDGSKYYFDEDTAEAYIGLSLINDGQYYFNDDGIMQVGFVTINDKVFYFSDSGIIESGVQNIDDNYFYIDDNGIVQIGVFDTSDGYKYFAPANTVNDNIYGQAVEYSGLVRVGEDVYYFGETYTIETGWIYDMENESDKYYFNPETKKACKGINLIDDIKYYFDEKGIMRTGLISFENNNYYFNENGEMQFGYINIEDKMFYFGEDGVMQIGVFNTPDGFKYFAHQNTLDENFEGESINYTGWLDLDEKRYYFTDEYIAATGSVIIDGEEYYFDPDTAQLVISE

SEQ ID NO: 717 - protein, 2365 aa, synthetic construct
  REGION 1..2365: note = Synthetic amino acid sequence
SLVNRKQLEKMANVRFRTQEDEYVAILDALEEYHNMSENTVVEKYLKLKDINSLTDIYIDTYKKSGRNKALKKFKEYLVTEVLELKNNNLTPVEKNLHFVWIGGQINDTAINYINQWKDVNSDYNVNVFYDSNAFLINTLKKTVVESAINDTLESFRENLNDPRFDYNKFFRKRMEIIYDKQKNFINYYKAQREENPELIIDDIVKTYLSNEYSKEIDELNTYIEESLNKITQNSGNDVRNFEEFKNGESFNLYEQELVERWNLAAASDILRISALKEIGGMYLAVAMLPGIQPDLFESIEKPSSVTVDFWEMTKLEAIMKYKEYIPEYTSEHFDMLDEEVQSSFESVLASKSDKSEIFSSLGDMEASPLEVKIAFNSKGIINQGLISVKDSYCSNLIVKQIENRYKILNNSLNPAISEDNDFNTTTNTFIDSIMAEANADNGRFMMELGKYLRVGFFPDVKTTINLSGPEAYAAAYQDLLMFKEGSMNIHLIEADLRNFEISKTNISQSTEQEMASLWSFDDARAKAQFEEYKRNYFEGSLGEDDNLDFSQNIVVDKEYLLEKISSLARSSERGYIHYIVQLQGDKISYEAACNLFAKTPYDSVLFQKNIEDSEIAYYYNPGDGEIQEIDKYKIPSIISDRPKIKLTFIGHGKDEFNTDIFAGFDVDSLSTEIEAAIDLAKEDISPKSIEINLLGANMFSYSINVEETYPGKLLLKVKDKISELMPSISQDSIIVSANQYEVRINSEGRRELLDHSGEWINKEESIIKDISSKEYISFNPKENKITVKSKNLPELSTLLQEIRNNSNSSDIELEEKVMLTECEINVISNIDTQIVEERIEEAKNLTSDSINYIKDEFKLIESISDALCDLKQQNELEDSHFISFEDISETDEGFSIRFINKETGESIFVETEKTIFSEYANHITEEISKIKGTIFDTVNGKLVKKVNLDTTHEVNTLNAAFFIQSLIEYNSSKESLSNLSVAMKVQVYAQLFSTGLNTITDAAKVVELVSTALDETIDLLPTLSEGLPIIATIIDGVSLGAAIKELSETSDPLLRQEIEAKIGIMAVNLTTATTAIITSSLGIASGFSILLVPLAGISAGIPSLVNNELVLRDKATKVVDYFKHVSLVETEGVFTLLDDKIMMPQDDLVISEIDFNNNSIVLGKCEIWRMEGGSGHTVTDDIDHFFSAPSITYREPHLSIYDVLEVQKEELDLSKDLMVLPNAPNRVFAWETGWTPGLRSLENDGTKLLDRIRDNYEGEFYWRYFAFIADALITTLKPRYEDTNIRINLDSNTRSFIVPIITTEYIREKLSYSFYGSGGTYALSLSQYNMGINIELSESDVWIIDVDNVVRDVTIESDKIKKGDLIEGILSTLSIEENKIILNSHEINFSGEVNGSNGFVSLTFSILEGINAIIEVDLLSKSYKLLISGELKILMLNSNHIQQKIDYIGFNSELQKNIPYSFVDSEGKENGFINGSTKEGLFVSELPDVVLISKVYMDDSKPSFGYYSNNLKDVKVITKDNVNILTGYYLKDDIKISLSLTLQDEKTIKLNSVHLDESGVAEILKFMNRKGNTNTSDSLMSFLESMNIKSIFVNFLQSNIKFILDANFIISGTTSIGQFEFICDENDNIQPYFIKFNTLETNYTLYVGNRQNMIVEPNYDLDDSGDISSTVINFSQKYLYGIDSCVNKVVISPNIYTDEINITPVYETNNTYPEVIVLDANYINEKINVNINDLSIRYVWSNDGNDFILMSTSEENKVSQVKIRFVNVFKDKTLANKLSFNFSDKQDVPVSEIILSFTPSYYEDGLIGYDLGLVSLYNEKFYINNFGMMVSGLIYINDSLYYFKPPVNNLITGFVTVGDDKYYFNPINGGAASIGETIIDDKNYYFNQSGVLQTGVFSTEDGFKYFAPANTLDENLEGEAIDFTGKLIIDENIYYFDDNYRGAVEWKELDGEMHYFSPETGKAFKGLNQIGDDKYYFNSDGVMQKGFVSINDNKHYFDDSGVMKVGYTEIDGKHFYFAENGEMQIGVFNTEDGFKYFAHHNEDLGNEEGEEISYSGILNFNNKIYYFDDSFTAVVGWKDLEDGSKYYFDEDTAEAYIGLSLINDGQYYFNDDGIMQVGFVTINDKVFYFSDSGIIESGVQNIDDNYFYIDDNGIVQIGVFDTSDGYKYFAPANTVNDNIYGQAVEYSGLVRVGEDVYYFGETYTIETGWIYDMENESDKYYFNPETKKACKGINLIDDIKYYFDEKGIMRTGLISFENNNYYFNENGEMQFGYINIEDKMFYFGEDGVMQIGVFNTPDGFKYFAHQNTLDENFEGESINYTGWLDLDEKRYYFTDEYIAATGSVIIDGEEYYFDPDTAQLVISE

SEQ ID NO: 718 - protein, 2365 aa, synthetic construct
  REGION 1..2365: note = Synthetic amino acid sequence
SLVNRKQLEKMANVRFRTQEDEYVAILDALEEYHNMSENTVVEKYLKLKDINSLTDIYIDTYKKSGRNKALKKFKEYLVTEVLELKNNNLTPVEKNLHFVWIGGQINDTAINYINQWKDVNSDYNVNVFYDSNAFLINTLKKTIVESAINDTLESFRENLNNPRFDYNKFFRKRMEIIYDKQKNFINYYKAQREENPELIIDDIVKIYLSNEYSKEIDELNTYIEESLNKIKQNSGNDVRNFEEFKNGESFKLYEQELVERWNLAAASDILRISALKEIGGMYLAVAMLPGIQPDLFESIEKPSSVTVDFWEMTKLEAIMKYKEYIPGYTSEHFDMLDEEVQSSFESALASKSDKSEIFSSLGDMEASPLEVKIAFNSKGIINQGLISVKDSYCSNLIVKQIENRYKILNNSLNPAISEDNDFNTTTNTFIDSIMAEANADNGRFMMELGKYLRVGFFPDVKTTVNLSGPEAYAAAYQDLLMFKEGSMNIHLIEADLRNFEISKTNISQSTEQEMASLWTFDDARAKVQFEEYKRNYFEGSLGEDDNLDFSQNIVVDKEYLLEKISSLARSSERGYIHYIVQLQGDKISYEAACNLFAKTPYDSILFQKNIENSEVAYYYNPGDGEIQEIDKYRIPSIISDRPKIKLTFIGHGKDEFNTDIFAGLDVDSLSTEIETAIDLAKEDISSKSIEINLLGANMFSYSINVEETYPGKLLLKVKDKISELMPSISQDSIIVSANQYEVRINNEGRRELLDHSGEWINKEESIIKDISSKEYISFNPKENKITVKSKNLPELSTLLQEIRNNSNLSDIELEEKVMLAECEINVISNIDTQIVEERIEEAKNLTSDSINYIKNEFKLIESISDSLYDLKQQNELDDSHFISFEDISKTEDGFSIRFINKETGESIFVETEKEIFSEYANHIEREISNIKDTIFDTVNGKLVKKVNLDAIHEVNTLNAAFFIQSLIGYSSSKESLSNLSVAMKVQVYAQLFSTGLNTITDAAKVVELVSTALDETIDLLPTLSEGLPVIATIIDGVSLGAAIKELSETSDPLLRQEIEAKIGIMAVNLTAATTAIITSSLGIASGFSILLVPLAGISAGIPSLVNNELVLRDKATKVVDYFKHISLVETEGAFTLLDDKIMIPQDDLVISEIDFNNNSIVLGKCEIWRMEGGSGHTVTNDIDHFFSSPTITYIKPHLSIYDVLEVQKEELDLSKDLMVLPNAPNRVFAWETGWTPGLRSLENEGTKLLDRIRDHYKGEFYWRYFAFIADALITTLKPRYEDTNIRINLDSNNRSFIVPIITTEHIREKLSYSFHGSGGTYALSLSQYNMGINIELSESDVWIIDVDNVVRDVTIDSDKIKKGDLIEGILSTLSIEDNKIILNHHEINFSGDVNGSNGFISLTFSILEGINAIIEVDLLSKSYKLLISGELKILMLNSNHIQQKIDYIGFNSELQKNIPYSFVDSEGKENGFINGSTKEGLFVSELPDVVLISKVYMDDSKPSFGYYSNNLKDVKVITKDNVNILTGYYLKDDIKISLSFTLQDEKTIKLNGVHLDESGVAEILKFMNKKGSTNTSDSLMSFLESVNIKSIFVNFLQSKINFILDANFIISGTTSIGQFEFICDENDNIQPYFIKFNTLETTYTLYVGNRQNMIVEPNYDLDDSGDISSTVINFSQKYLYGIDSCVNKVVISPNIYTDEINITPVYETNNNYPEVIVLDANYINEKINVNINDLSIRYVWSNDGNDFILMSTSEENKVSQVKIRFVNVFKDKTLANKLSFNFSDKQDVPVSEIISAFTPSYYEDGLIGYDLGLVSLYNEKFYINNFGMMVSGLIYINDSLYYFKPPVNNLITGFVTVGDDKYYFNPTNGGAASIGETIINDKNYYFNQSGILQTGVFSTEDGLKYFAPANTLDENLEGEAIDFTGKLIIDENIYYFEDNYRGAVEWKELDGEMYYFSPETGKAFKGLNQIGDDKYYFNSDGIMQKGFVSINDKKYYFDDSGVMKVGYIEIDGKYFYFAENGEMQIGVFNTSDGFKYFAHHNEDLGNEEGEAISYSGILNFNNKIYYFDYSFTAVVGWKDLEDGSKYYFDEDTAEAYVGLSLINDGQYYFNDDGIMQVGFVTINNKVFYFSDSGIIESGVQNIDDNYFYIDEKGIVQIGVFDTSDEYKYFAPANTVNDNIYGQAVDYSGLVRVGEDIYYFGETYTIETGWIYDMENESDKYYFNPETKKACKGINLIDDIKYYFDENGIMRTGLISFENNDYYFNENGEMQFGYINIEDKMFYFGEDGVMQIGVFNTQDGFKYFAHQNTLDENFEGESINYTGWLDLDEKRYYFTDEYIAATGSVIIDGEEYYFDPDTAQLVISE

SEQ ID NO: 719 - protein, 2365 aa, synthetic construct; identical to SEQ ID NO: 717
  REGION 1..2365: note = Synthetic amino acid sequence

SEQ ID NO: 720 - protein, 2365 aa, synthetic construct; identical to SEQ ID NO: 718
  REGION 1..2365: note = Synthetic amino acid sequence

SEQ ID NO: 721 - protein, 2365 aa, synthetic construct; identical to SEQ ID NO: 712
  REGION 1..2365: note = Synthetic amino acid sequence

SEQ ID NO: 722 - protein, 2365 aa, synthetic construct
  REGION 1..2365: note = Synthetic amino acid sequence
SLVNRKQLEKMANVRFRTQEDEYVAILDALEEYHNMSENTVVEKYLKLKDINSLTDIYIDTYKKSGRNKALKKFKEYLVTEVLELKNNNLTPVEKNLHFVWIGGQINDTAINYINQWKDVNSDYNVNVFYDSNAFLINTLKKTVVESAINDTLESFRENLNDPRFDYNKFFRKRMEIIYDKQKNFINYYKAQREENPELIIDDIVKTYLSNEYSKEIDELNTYIEESLNKITQNSGNDVRNFEEFKNGESFNLYEQELVERWNLAAASDILRISALKEIGGMYLAVAMLPGIQPDLFESIEKPSSVTVDFWEMTKLEAIMKYKEYIPEYTSEHFDMLDEEVQSSFESVLASKSDKSEIFSSLGDMEASPLEVKIAFNSKGIINQGLISVKDSYCSNLIVKQIENRYKILNNSLNPAISEDNDFNTTTNTFIDSIMAEANADNGRFMMELGKYLRVGFFPDVKTTINLSGPEAYAAAYQDLLMFKEGSMNIHLIEADLRNFEIFKTNISQSTEQEMASLWSFDDARAKAQFEEYKRNYFEGSLGEDDNLDFSQNIVVDKEYLLEKISSLARSSERGYIHYIVQLQGDKISYEAACNLFAKTPYDSVLFQKNIEDSEIAYYYNPGDGEIQEIDKYKIPSIISDRPKIKLTFIGHGKDEFNTDIFAGFDVDSLSTEIEAAIDLAKEDISPKSIEINLLGANMFSYSINVEETYPGKLLLKVKDKISELMPSISQDSIIVSANQYEVRINSEGRRELLDHSGEWINKEESIIKDISSKEYISFNPKENKITVKSKNLPELSTLLQEIRNNSNSSDIELEEKVMLTECEINVISNIDTQIVEERIEEAKNLTSDSINYIKDEFKLIESISDALCDLKQQNELEDSHFISFEDISETDEGFSIRFINKETGESIFVETEKTIFSEYANHITEEISKIKGTIFDTVNGKLVKKVNLDTTHEVNTLNAAFFIQSLIEYNSSKESLSNLSVAMKVQVYAQLFSTGLNTITDAAKVVELVSTALDETIDLLPTLSEGLPIIATIIDGVSLGAAIKELSETSDPLLRQEIEAKIGIMAVNLTTATTAIITSSLGIASGFSILLVPLAGISAGIPSLVNNELVLRDKATKVVDYFKHVSLVETEGVFTLLDDKIMMPQDDLVISEIDFNNNSIVLGKCEIWRMEGGSGHTVTDDIDHFFSAPSITYREPHLSIYDVLEVQKEELDLSKDLMVLPNAPNRVFAWETGWTPGLRSLENDGTKLLDRIRDNYEGEFYWRYFAFIADALITTLKPRYEDTNIRINLDSNTRSFIVPIITTEYIREKLSYSFYGSGGTYALSLSQYNMGINIELSESDVWIIDVDNVVRDVTIESDKIKKGDLIEGILSTLSIEENKIILNSHEINFSGEVNGSNGFVSLTFSILEGINAIIEVDLLSKSYKLLISGELKILMLNSNHIQQKIDYIGFNSELQKNIPYSFVDSEGKENGFINGSTKEGLFVSELPDVVLISKVYMDDSKPSFGYYSNNLKDVKVITKDNVNILTDYYLKDDIKISLSLTLQDEKTIKLNSVHLDESGVAEILKFMNRKGNTNTSDSLMSFLESMNIKSIFVNFLQSNIKFILDANFIISGTTSIGQFEFICDENDNIQPYFIKFNTLETNYTLYVGNRQNMIVEPNYDLDDSGDISSTVINFSQKYLYGIDSCVNKVVISPNIYTDEINITPVYETNNTYPEVIVLDANYINEKINVNINDLSIRYVWSNDGNDFILMSTSEENKVSQVKIRFVNVFKDKTLANKLSFNFSDKQDVPVSEIILSFTPSYYEDGLIGYDLGLVSLYNEKFYINNFGMMVSGLIYINDSLYYFKPPVNNLITGFVTVGDDKYYFNPINGGAASIGETIIDDKNYYFNQSGVLQTGVFSTEDGFKYFAPANTLDENLEGEAIDFTGKLIIDENIYYFDDNYRGAVEWKELDGEMHYFSPETGKAFKGLNQIGDYKYYFNSDGVMQKGFVSINDNKHYFDDSGVMKVGYTEIDGKHFYFAENGEMQIGVFNTEDGFKYFAHHNEDLGNEEGEEISYSGILNFNNKIYYFDDSFTAVVGWKDLEDGSKYYFDEDTAEAYIGLSLINDGQYYFNDDGIMQVGFVTINDKVFYFSDSGIIESGVQNIDDNYFYIDDNGIVQIGVFDTSDGYKYFAPANTVNDNIYGQAVEYSGLVRVGEDVYYFGETYTIETGWIYDMENESDKYYFNPETKKACKGINLIDDIKYYFDEKGIMRTGLISFENNNYYFNENGEMQFGYINIEDKMFYFGEDGVMQIGVFNTPDGFKYFAHQNTLDENFEGESINYTGWLDLDEKRYYFTDEYIAATGSVIIDGEEYYFDPDTAQLVISE

SEQ ID NO: 723 - protein, 2366 aa, synthetic construct
  REGION 1..2366: note = Synthetic amino acid sequence
SLVNRKQLEKMANVRFRVQEDEYVAILDALEEYHNMSENTVVEKYLKLKDINSLTDTYIDTYKKSGRNKALKKFKEYLVIEILELKNSNLTPVEKNLHFIWIGGQINDTAINYINQWKDVNSDYNVNVFYDSNAFLINTLKKTIIESASNDTLESFRENLNDPEFNHTAFFRKRMQIIYDKQQNFINYYKAQKEENPDLIIDDIVKTYLSNEYSKDIDELNAYIEESLNKVTENSGNDVRNFEEFKTGEVFNLYEQELVERWNLAGASDILRVAILKNIGGVYLAVAMLPGIHPDLFKDINKPDSVKTAVDWEEMQLEAIMKHKEYIPEYTSKHFDTLDEEVQSSFESVLASKSDKSEIFLPLGDIEVSPLEVKIAFAKGSIINQALISAKDSYCSDLLIKQIQNRYKILNDTLGPIISQGNDFNTTMNNFGESLGAIANEENISFIAKIGSYLRVGFYPEANTTITLSGPTIYAGAYKDLLTFKEMSIDTSILSSELRNFEFPKVNISQATEQEKNSLWQFNEERAKIQFEEYKKNYFEGALGEDDNLDFSQNTVTDKEYLLEKISSSTKSSERGYVHYIVQLQGDKISYEAACNLFAKNPYDSILFQKNIEDSEVAYYYNPTDSEIQEIDKYRIPDRISDRPKIKLTFIGHGKAEFNTDIFAGLDVDSLSSEIETAIGLAKEDISPKSIEINLLGANMFSYSVNVEETYPGKLLLRVKDKVSELMPSMSQDSIIVSANQYEVRINSEGRRELLDHSGEWINKEESIIKDISSKEYISFNPKENKIIVKSKNLPELSTLLQEIRNNSNSSDIELEEKVMLAECEINVISNIETQVVEERIEEAKSLTSDSINYIKNEFKLIESISDALCDLKQQNELEDSHFISFEDISETDEGFSIRFINKETGESIFVETEKTIFSEYANHITEEISKIKGTIFDTVNGKLVKKVNLDTTHEVNTLNAAFFIQSLIEYNSSKESLSNLSVAMKVQVYAQLFSTGLNTITDAAKVVELVSTALDETIDLLPTLSEGLPIIATIIDGVSLGAAIKELSETSDPLLRQEIEAKIGIMAVNLTTATTAIITSSLGIASGFSILLVPLAGISAGIPSLVNNELVLRDKATKVVDYFKHVSLVETEGVFTLLDDKVMMPQDDLVISEIDFNNNSIVLGKCEIWRMEGGSGHTVTDDIDHFFSAPSITYREPHLSIYDVLEVQKEELDLSKDLMVLPNAPNRVFAWETGWTPGLRSLENDGTKLLDRIRDNYEGEFYWRYFAFIADALITTLKPRYEDTNIRINLDSNTRSFIVPIITTEYIREKLSYSFYGSGGTYALSLSQYNMGINIELSESDVWIIDVDNVVRDVTIESDKIKKGDLIEGILSTLSIEENKIILNSHEINFSGEVNGSNGFVSLTFSILEGINAIIEVDLLSKSYKLLISGELKILMLNSNHIQQKIDYIGFNSELQKNIPYSFVDSEGKENGFINGSTKEGLFVSELPDVVLISKVYMDDSKPSFGYYSNNLKDVKVITKDNVNILTGYYLKDDIKISLSLTLQDEKTIKLNSVHLDESGVAEILKFMNRKGSTNTSDSLMSFLESMNIKSIFVNFLQSNIKFILDANFIISGTTSIGQFEFICDENNNIQPYFIKFNTLETNYTLYVGNRQNMIVEPNYDLDDSGDISSTVINFSQKYLYGIDSCVNKVVISPNIYTDEINITPVYETNNTYPEVIVLDANYINEKINVNINDLSIRYVWSNDGNDFILMSTSEENKVSQVKIRFVNVFKDKTLANKLSFNFSDKQDVPVSEIILSFTPSYYEDGLIGYDLGLVSLYNEKFYINNFGMMVSGLIYINDSLYYFKPPVNNLITGFVTVGDDKYYFNPINGGAASIGETIIDDKNYYFNQSGVLQTGVFSTEDGFKYFAPANTLDENLEGEAIDFTGKLIIDENIYYFEDNYRGAVEWKELDGEMHYFSPETGKAFKGLNQIGDDKYYFNSDGVMQKGFVSINDNKHYFDDSGVMKVGYTEIDGKHFYFAENGEMQIGVFNTEDGFKYFAHHNEDLGNEEGEEISYSGILNFNNKIYYFDDSFTAVVGWKDLEDGSKYYFDEDTAEAYIGLSLINDGQYYFNDDGIMQVGFVTINDKVFYFSDSGIIESGVQNIDDNYFYIDDNGIVQIGVFDTSDGYKYFAPANTVNDNIYGQAVEYSGLVRVGEDVYYFGETYTIETGWIYDMENESDKYYFDPETKKACKGINLIDDIKYYFDEKGIMRTGLISFENNNYYFNENGEMQFGYINIEDKMFYFGEDGVMQIGVFNTPDGFKYFAHQNTLDENFEGESINYTGWLDLDEKRYYFTDEYIAATGSVIIDGEEYYFDPDTAQLVISE

SEQ ID NO: 724 - protein, 2365 aa, synthetic construct; identical to SEQ ID NO: 713
  REGION 1..2365: note = Synthetic amino acid sequence

SEQ ID NO: 725 - protein, 2365 aa, synthetic construct; identical to SEQ ID NO: 718
  REGION 1..2365: note = Synthetic amino acid sequence

SEQ ID NO: 726 - protein, 2365 aa, synthetic construct; identical to SEQ ID NO: 717
  REGION 1..2365: note = Synthetic amino acid sequence

SEQ ID NO: 727 - protein, 2365 aa, synthetic construct; identical to SEQ ID NO: 718
  REGION 1..2365: note = Synthetic amino acid sequence

SEQ ID NO: 728 - protein, 2366 aa, synthetic construct
  REGION 1..2366: note = Synthetic amino acid sequence
SLVNRKQLEKMANVRFRVQEDEYVAILDALEEYHNMSENTVVEKYLKLKDINSLTDTYIDTYKKSGRNKALKKFKEYLVTEILELKNSNLTPVEKNLHFIWIGGQINDTAINYINQWKDVNSDYNVNVFYDSNAFLINTLKKTIIESASNDTLESFRENLNDPEFNHTAFFRKRMQIIYDKQQNFINYYKAQKEENPDLIIDDIVKTYLSNEYSKDIDELNAYIEESLNKVTENSGNDVRNFEEFKTGEVFNLYEQELVERWNLAGASDILRVAILKNIGGVYLAVAMLPGIHPDLFKDINKPDSVKTAVDWEEMQLEAIMKYKEYIPEYTSKHFDTLDEEVQSSFESVLASKSDKSEIFLPLGDIEVSPLEVKIAFAKGSIINQALISAKDSYCSDLLIKQIQNRYKILNDTLGPIISQGNDFNTTMNNFGESLGAIANEENISFIAKIGSYLRVGFYPEANTTITLSGPTIYAGAYKDLLTFKEMSIDTSILSSELRNFEFPKVNISQATEQEKNSLWQFNEERAKIQFEEYKKNYFEGALGEDDNLDFSQNTVIDKEYLLEKISSSTKSSERGYVHYIVQLQGDKISYEAACNLFAKNPYDSILFQKNIEDSEVAYYYNPTDSEIQEIDKYRIPDRISDRPKIKLTLIGHGKAEFNTDIFAGLDVDSLSSEIETIIDLAKADISPKSIEINLLGANMFSYSVNVEETYPGKLLLRVKDKVSELMPSISQDSIIVSANQYEVRINSEGRRELLDHSGEWINKEESIIKDISSKEYISFNPKENKIIVKSKNLPELSTLLQEIRNNSNSSDIELEEKVMLAECEINVISNIETQVVEERIEEAKSLTSDSINYIKNEFKLIESISDALYDLKQQNELEESHFISFEDISETDEGFSIRFIDKETGESIFVETEKAIFSEYANHITEEISKIKGTIFDTVNGKLVKKVNLDATHEVNTLNAAFFIQSLIEYNSSKESLSNLSVAMKVQVYAQLFSTGLNTITDAAKVVELVSTALDETIDLLPTLSEGLPVIATIIDGVSLGAAIKELSETSDPLLRQEIEAKIGIMAVNLTAATTAIITSSLGIASGFSILLVPLAGISAGIPSLVNNELILRDKATKVVDYFSHISLAESEGAFTSLDDKIMMPQDDLVISEIDFNNNSITLGKCEIWRMEGGSGHTVTDDIDHFFSSPSITYREPHLSIYDVLEVKKEELDLSKDLMVLPNAPNRVFGWETGWTPGLRGLENDGTKLLDRIRDQYEGQFYWRFFAFIADALITTLKPRYEDTNVRISLDSNTRSFIVPVITTEYIREKLSYSFYGSGGTYALSLSQYNMNINIELNENDTWVIDVDNVVRSVTIESDKIKKGDLIENILSKLSIEDNKIILDNHEINFSGTLNGGNGFVSLTFSILEGINAVIEVDLLSKSYKVLISGELKTLMANSNSVQQKIDYIGLNSELQKNIPYSFMDDKGKENGFINCSTKEGLFVSELSDVVLIIKVYMDNSKPPFGYYSNDLKDVKAITKDDVIILTGYYLKDDIKISLSFTIQDKNTIKLNGVYLDENGVAEILKFMNKKGSTNTSDSLMSFLESMNIKSIFIKSLKSNAKLILDTNFIISGTTSIGQFEFICDKDNNIQPYFIKFNTLETKYTLYVGNRQNMIVEPNYDLDDSGDISSTVINFSQKYLYGIDSCVNKVIISPNIYTDEINITPIYEANNTYPEVIVLDTNYISEKINININDLSIRYVWSNDGSDFILMSTDEENKVSQVKIRFTNVFKGNTISDKISFNFSDKQDVSINKIISTFTPSYYVEGLLNYHLGLISLYNEKFYINNFGMMVSGLVYINDSLYYFKPPIKNLITGFTTIGDDKYYFNPDNGGAASVGETIIDGKNYYFSPNGVLQTGVFSTEDGFKYFAPADTLDENLEGEAIDFTGKLIIDENVYYFGDNYRAAIEWQTLDDEVYYFSTDTGRAFKGLNQIGDDKFYFNSDGIMQKGFVNINDKTFYFDDSGVMKSGYTEIDGKHFYFAENGEMQIGVFNTADGFKYFAHHDEDLGNEEGEALSYSGILNFNNKIYYFDDSFTAVVGWKDSEDGSKYYFDEDTAEAYIGISTINDGKYYFNDSGIMQIGFVTINNEVFYFSDSGIVESGMQNIDDNYFYIDENGLVQIGVFDTSDGYKYFAPANTVNDNIYGQAVEYSGLVRVGEDVYYFGETYTIETGWIYDMENESDKYYFDPETKKAYKGINVIDDIKYYFDENGIMRTGLITFEDNHYYFNEDGIMQYGYINIEDKMFYFNEDGVMQIGVFNTADGFKYFAHQNTLDENFEGESINYTGWLDLDEKRYYFTDEYIAAIGSVIIDGEEYYFDPDTAELVISE

SEQ ID NO: 729 - protein, 2366 aa, synthetic construct; identical to SEQ ID NO: 728
  REGION 1..2366: note = Synthetic amino acid sequence

SEQ ID NO: 730 - protein, 2366 aa, synthetic construct
  REGION 1..2366: note = Synthetic amino acid sequence
SLVNRKQLEKMANVRFRVQEDEYVAILDALEEYHNMSENTVVEKYLKLKDINSLTDTYIDTYKKSGRNKALKKFKEYLVTEILELKNSNLTPVEKNLHFIWIGGQINDTAINYINQWKDVNSDYNVNVFYDSNAFLINTLKKTIIESASNDTLESFRENLNDPEFNHTAFFRKRMQIIYDKQQNFINYYKAQKEENPDLIIDDIVKTYLSNEYSKDIDELNAYIEESLNKVTENSGNDVRNFEEFKTGEVFNLYEQELVERWNLAGASDILRVAILKNIGGVYLAVAMLPGIHPDLFKDINKPDSVKTAVDWEEMQLEAIMKYKEYIPEYTSKHFDTLDEEVQSSFESVLASKSDKSEIFLPLGDIEVSPLEVKIAFAKGSIINQALISAKDSYCSDLLIKQIQNRYKILNDTLGPIISQGNDFNTTMNNFGESLGAIANEENISFIAKIGSYLRVGFYPEANTTITLSGPTIYAGAYKDLLTFKEMSIDTSILSSELRNFEFPKVNISQATEQEKNSLWQFNEERAKIQFEEYKKNYFEGALGEDDNLDFSQNTVIDKEYLLEKISSSTKSSERGYVHYIVQLQGDKISYEAACNLFAKNPYDSILFQKNIEDSEVAYYYNPTDSEIQEIDKYRIPDRISDRPKIKLTLIGHGKAEFNTDIFAGLDVDSLSSEIETIIDLAKADISPKSIEINLLGANMFSYSVNVEETYPGKLLLRVKDKVSELMPSISQDSIIVSANQYEVRINSEGRRELLDHSGEWINKEESIIKDISSKEYISFNPKENKIIVKSKNLPELSTLLQEIRNNSNSSDIELEEKVMLAECEINVISNIETQVVEERIEEAKSLTSDSINYIKNEFKLIESISDALYDLKQQNELEESHFISFEDISETDEGFSIRFIDKETGESIFVETEKAIFSEYANHITEEISKIKGTIFDTVNGKLVKKVNLDATHEVNTLNAAFFIQSLIEYNSSKESLSNLSVAMKVQVYAQLFSTGLNTITDAAKVVELVSTALDETIDLLPTLSEGLPVIATIIDGVSLGAAIKELSETSDPLLRQEIEAKIGIMAVNLTAATTAIITSSLGIASGFSILLVPLAGISAGIPSLVNNELILRDKATKVVDYFSHISLAESEGAFTSLDDKIMMPQDDLVISEIDFNNNSITLGKCEIWRMEGGSGHTVTDDIDHFFSSPSITYREPHLSIYDVLEVKKEELDLSKDLMVLPNAPNRVFGWETGWTPGLRGLENDGTKLLDRIRDQYEGQFYWRFFAFIADALITTLKPRYEDTNVRISLDSNTRSFIVPVITTEYIREKLSYSFYGSGGTYALSLSQYNMNINIELNENDTWVIDVDNVVRSVTIESDKIKKGDLIENILSKLSIEDNKIILDNHEINFSGTLNGGNGFVSLTFSILEGINAVIEVDLLSKSYKVLISGELKTLMANSNSVQQKIDYIGLNSELQKNIPYSFMDDKGKENGFINCSTKDGLFVSELSDVVLIIKVYMDNSKPPFGYYSNDLKDVKAITKDDVIILTGYYLKDDIKISLSFTIQDKNTIKLNGVYLDENGVAEILKFMNKKGSTNTSDSLMSFLESMNIKSIFIKSLKSNAKLILDTNFIISGTTSIGQFEFICDKDNNIQPYFIKFNTLETKYTLYVGNRQNMIVEPNYDLDDSGDISSTVINFSQKYLYGIDSCVNKVIISPNIYTDEINITPIYEANNTYPEVIVLDTNYISEKINININDLSIRYVWSNDGSDFILMSTDEENKVSQVKIRFTNVFKGNTISDKISFNFSDKQDVSINKIISTFTPSYYVEGLLNYHLGLISLYNEKFYINNFGMMVSGLVYINDSLYYFKPPIKNLITGFTTIGDDKYYFNPDNGGAASVGETIIDGKNYYFSPNGVLQTGVFSTEDGFKYFAPADTLDENLEGEAIDFTGKLIIDENVYYFGDNYRAAIEWQTLDDEVYYFSTDTGRAFKGLNQIGDDKFYFNSDGIMQKGFVNINDKTFYFDDSGVMKSGYTEIDGKHFYFAENGEMQIGVFNTADGFKYFAHHDEDLGNEEGEALSYSGILNFNNKIYYFDDSFTAVVGWKDSEDGSKYYFDEDTAEAYIGISTINDGKYYFNDSGIMQIGFVTINNEVFYFSDSGIVESGMQNIDDNYFYIDENGLVQIGVFDTSDGYKYFAPANTVNDNIYGQAVEYSGLVRVGEDVYYFGETYTIETGWIYDMENESDKYYFDPETKKAYKGINVIDDIKYYFDENGIMRTGLITFEDNHYYFNEDGIMQYGYINIEDKMFYFNEDGVMQIGVFNTADGFKYFAHQNTLDENFEGESINYTGWLDLDEKRYYFTDEYIAAIGSVIIDGEEYYFDPDTAELVISE

SEQ ID NO: 731 - protein, 2365 aa, synthetic construct; identical to SEQ ID NO: 713
  REGION 1..2365: note = Synthetic amino acid sequence

SEQ ID NO: 732 - protein, 2365 aa, synthetic construct; identical to SEQ ID NO: 717
  REGION 1..2365: note = Synthetic amino acid sequence

SEQ ID NO: 733 - protein, 2365 aa, synthetic construct
  REGION 1..2365: note = Synthetic amino acid sequence
SLVNRKQLEKMANVRFRTQEDEYVAILDALEEYHNMSENTVVEKYLKLKDINSLTDIYIDTYKKSGRNKALKKFKEYLVTEVLELKNNNLTPVEKNLHFVWIGGQINDTAINYINQWKDVNSDYNVNVFYDSNAFLINTLKKTVVESAINDTLESFRENLNDPRFDYNKFFRKRMEIIYDKQKNFINYYKAQREENPELIIDDIVKTYLSNEYSKEIDELNTYIEESLNKITQNSGNDVRNFEEFKNGESFNLYEQELVERWNLAAASDILRISALKEIGGMYLAVAMLPGIQPDLFESIEKPSSVTVDFWEMTKLEAIMKYKEYIPEYTSEHFDMLDEEVQSSFESVLASKSDKSEIFSSLGDMEASPLEVKIAFNSKGIINQGLISVKDSYCSNLIVKQIENRYKILNNSLNPAISEDNDFNTTTNTFIDSIMAEANADNGRFMMELGKYLRVGFFPDVKTTINLSGPEAYAAAYQDLLMFKEGSMNIHLIEADLRNFEISKTNISQSTEQEMASLWSFDDARAKAQFEEYKRNYFEGSLGEDDNLDFSQNIVVDKEYLLEKISSLARSSERGYIHYIVQLQGDKISYEAACNLFAKTPYDSVLFQKNIEDSEIAYYYNPGDGEIQEIDKYKIPSIISDRPKIKLTFIGHGKDEFNTDIFAGFDVDSLSTEIEAAIDLAKEDISPKSIEINLLGANMFSYSINVEETYPGKLLLKVKDKISELMPSISQDSIIVSANQYEVRINSEGRRELLDHSGEWINKEESIIKDISSKEYISFNPKENKITVKSKNLPELSTLLQEIRNNSNSSDIELEEKVMLTECEINVISNIDTQIVEERIEEAKNLTSDSINYIKDEFKLIESISDALCDLKQQNELEDSHFISFEDISETDEGFSIRFINKETGESIFVETEKTIFSEYANHITEEISKIKGTIFDTVNGKLVKKVNLDTTHEVNTLNAAFFIQSLIEYNSSKESLSNLSVAMKVQVYAQLFSTGLNTITDAAKVVELVSTALDETIDLLPTLSEGLPIIATIIDGVSLGAAIKELSETSDPLLRQEIEAKIGIMAVNLTTATTAIITSSLGIASGFSILLVPLAGISAGIPSLVNNELVLRDKATKVVDYFKHVSLVETEGVFTLLDDKIMMPQDDLVISEIDFNNNSIVLGKCEIWRMEGGSGHTVTDDIDHFFSAPSITYREPHLSIYDVLEVQKEELDLSKDLMVLPNAPNRVFAWETGWTPGLRSLENDGTKLLDRIRDNYEGEFYWRYFAFIADALITTLKPRYEDTNIRINLDSNTRSFIVPIITTEYIREKLSYSFYGSGGTYALSLSQYNMGINIELSESDVWIIDVDNVVRDVTIESDKIKKGDLIEGILSTLSIEENKIILNSHEINFSGEVNGSNGFVSLTFSILEGINAIIEVDLLSKSYKLLISGELKILMLNSNHIQQKIDYIGFNSELQKNIPYSFVDSEGKENGFINGSTKEGLFVSELPDVVLISKVYMDDSKPSFGYYSNNLKDVKVITKDNVNILTGYYLKDDIKISLSLTLQDEKTIKLNSVHLDESGVAEILKFMNRKGNTNTSDSLMSFLESMNIKSIFVNFLQSNIKFILDANFIISGTTSIGQFEFICDENDNIQPYFIKFNTLETNYTLYVGNRQNMIVEPNYDLDDSGDISSTVINFSQKYLYGIDSCVNKVVISPNIYTDEINITPVYETNNTYPEVIVLDANYINEKINVNINDLSIRYVWSNDGNDFILMSTSEENKVSQVKIRFVNVFKDKTLANKLSFNFSDKQDVPVSEIILSFTPSYYEDGLIGYDLGLVSLYNEKFYINNFGMMLSGLIYINDSLYYFKPPVNNLITGFVTVGDDKYYFNPINGGAASIGETIIDDKNYYFNQSGVLQTGVFSTEDGFKYFAPANTLDENLEGEAIDFTGKLIIDENIYYFDDNYRGAVEWKELDGEMHYFSPETGKAFKGLNQIGDDKYYFNSDGVMQKGFVSINDNKHYFDDSGVMKVGYTEIDGKHFYFAENGEMQIGVFNTEDGFKYFAHHNEDLGNEEGEEISYSGILNFNNKIYYFDDSFTAVVGWKDLEDGSKYYFDEDTAEAYIGLSLINDGQYYFNDDGIMQVGFVTINDKVFYFSDSGIIESGVQNIDDNYFYIDDNGIVQIGVFDTSDGYKYFAPANTVNDNIYGQAVEYSGLVRVGEDVYYFGETYTIETGWIYDMENESDKYYFNPETKKACKGINLIDDIKYYFDEKGIMRTGLISFENNNYYFNENGEMQFGYINIEDKMFYFGEDGVMQIGVFNTPDGFKYFAHQNTLDENFEGESINYTGWLDLDEKRYYFTDEYIAATGSVIIDGEEYYFDPDTAQLVISE

SEQ ID NO: 734 - protein, 2365 aa, synthetic construct; identical to SEQ ID NO: 713
  REGION 1..2365: note = Synthetic amino acid sequence

SEQ ID NO: 735 - protein, 2365 aa, synthetic construct; identical to SEQ ID NO: 712
  REGION 1..2365: note = Synthetic amino acid sequence

SEQ ID NO: 736 - protein, 2365 aa, synthetic construct; identical to SEQ ID NO: 713
  REGION 1..2365: note = Synthetic amino acid sequence

SEQ ID NO: 737 - protein, 2365 aa, synthetic construct; identical to SEQ ID NO: 713
  REGION 1..2365: note = Synthetic amino acid sequence

SEQ ID NO: 738 - protein, 2365 aa, synthetic construct
  REGION 1..2365: note = Synthetic amino acid sequence
SLVNRKQLEKMANVRFRTQEDEYVAILDALEEYHNMSENTVVEKYLKLKDINSLTDIYIDTYKKSGRNKALKKFKEYLVTEVLELKNNNLTPVEKNLHFVWIGGQINDTAINYINQWKDVNSDYNVNVFYDSNAFLINTLKKTVVESAINDTLESFRENLNDPRFDYNKFFRKRMEIIYDKQKNFINYYKAQREENPELIIDDIVKTYLSNEYSKEIDELNTYIEESLNKITQNSGNDVRNFEEFKNGESFNLYEQELVERWNLAAASDILRISALKEIGGMYLAVAMLPGIQPGLFESIEKPSSVTVDFWEMTKLEAIMKYKEYIPEYTSEHFDMLDEEVQSSFESVLASKSDKSEIFSSLGDMEASPLEVKIAFNSKGIINQGLISVKDSYCSNLIVKQIENRYKILNNSLNPAISEDNDFNTTTNTFIDSIMAEANADNGRFMMELGKYLRVGFFPDVKTTINLSGPEAYAAAYQDLLMFKEGSMNIHLIEADLRNFEISKTNISQSTEQEMASLWSFDDARAKAQFEEYKRNYFEGSLGEDDNLDFSQNIVVDKEYLLEKISSLARSSERGYIHYIVQLQGDKISYEAACNLFAKTPYDSVLFQKNIEDSEIAYYYNPGDGEIQEIDKYKIPSIISDRPKIKLTFIGHGKDEFNTDIFAGFDVDSLSTEIEAAIDLAKEDISPKSIEINLLGANMFSYSINVEETYPGKLLLKVKDKISELMPSISQDSIIVSANQYEVRINSEGRRELLDHSGEWINKEESIIKDISSKEYISFNPKENKITVKSKNLPELSTLLQEIRNNSNSSDIELEEKVMLTECEINVISNIDTQIVEERIEEAKNLTSDSINYIKDEFKLIESISDALCDLKQQNELEDSHFISFEDISETDEGFSIRFINKETGESIFVETEKTIFSEYANHITEEISKIKGTIFDTVNGKLVKKVNLDTTHEVNTLNAAFFIQSLIEYNSSKESLSNLSVAMKVQVYAQLFSTGLNTITDAAKVVELVSTALDETIDLLPTLSEGLPIIATIIDGVSLGAAIKELSETSDPLLRQEIEAKIGIMAVNLTTATTAIITSSLGVASGFSILLVPLAGISAGIPSLVNNELVLRDKATKVVDYFKHVSLVETEGVFTLLDDKIMMPQDDLVISEIDFNNNSIVLGKCEIWRMEGGSGHTVTDDIDHFFSAPSITYREPHLSIYDVLEVQKEELDLSKDLMVLPNAPNRVFAWETGWTPGLRSLENDGTKLLDRIRDNYEGEFYWRYFAFIADALITTLKPRYEDTNIRINLDSNTRSFIVPIITTEYIREKLSYSFYGSGGTYALSLSQYNMGINIELSESDVWIIDVDNVVRDVTIESDKIKKGDLIEGILSTLSIEENKIILNSHEINFSGEVNGSNGFVSLTFSILEGINAIIEVDLLSKSYKLLISGELKILMLNSNHIQQKIDYIGFNSELQKNIPYSFVDSEGKENGFINGSTKEGLFVSELPDVVLISKVYMDDSKPSFGYYSNNLKDVKVITKDNVNILTGYYLKDDIKISLSLTLQDEKTIKLNSVHLDESGVAEILKFMNRKGNTNTSDSLMSFLESMNIKSIFVNFLQSNIKFILDANFIISGTTSIGQFEFICDENDNIQPYFIKFNTLETNYTLYVGNRQNMIVEPNYDLDDSGDISSTVINFSQKYLYGIDSCVNKVVISPNIYTDEINITPVYETNNTYPEVIVLDANYINEKINVNINDLSIRYVWSNDGNDFILMSTSEENKVSQVKIRFVNVFKDKTLANKLSFNFSDKQDVPVSEIILSFTPSYYEDGLIGYDLGLVSLYNEKFYINNFGMMVSGLIYINDSLYYFKPPVNNLITGFVTVGDDKYYFNPINGGAASIGETIIDDKNYYFNQSGVLQTGVFSTEDGFKYFAPANTLDENLEGEAIDFTGKLIIDENIYYFDDNYRGAVEWKELDGEMHYFSPETGKAFKGLNQIGDYKYYFNSDGVMQKGFVSINDNKHYFDDSGVMKVGYTEIDGKHFYFAENGEMQIGVFNTEDGFKYFAHHNEDLGNEEGEEISYSGILNFNNKIYYFDDSFTAVVGWKDLEDGSKYYFDEDTAEAYIGLSLINDGQYYFNDDGIMQVGFVTINDKVFYFSDSGIIESGVQNIDDNYFYIDDNGIVQIGVFDTSDGYKYFAPANTVNDNIYGQAVEYSGLVRVGEDVYYFGETYTIETGWIYDMENESDKYYFNPETKKACKGINLIDDIKYYFDEKGIMRTGLISFENNNYYFNENGEMQFGYINIEDKMFYFGEDGVMQIGVFNTPDGFKYFAHQNTLDENFEGESINYTGWLDLDEKRYYFTDEYIAATGSVIIDGEEYYFDPDTAQLVISE

SEQ ID NO: 739 - protein, 2365 aa, synthetic construct; identical to SEQ ID NO: 738
  REGION 1..2365: note = Synthetic amino acid sequence

SEQ ID NO: 740 - protein, 2365 aa, synthetic construct; identical to SEQ ID NO: 713
  REGION 1..2365: note = Synthetic amino acid sequence

SEQ ID NO: 741 - protein, 2365 aa, synthetic construct
  REGION 1..2365: note = Synthetic amino acid sequence
SLVNRKQLEKMANVRFRTQEDEYVAILDALEEYHNMSENTVVEKYLKLKDINSLTDIYIDTYKKSGRNKALKKFKEYLVTEVLELKNNNLTPVEKNLHFVWIGGQINDTAINYINQWKDVNSDYNVNVFYDSNAFLINTLKKTVVESAINDTLESFRENLNDPRFDYNKFFRKRMEIIYDKQKNFINYYKAQREENPELIIDDIVKTYLSNEYSKEIDELNTYIEESLNKITQNSGNDVRNFEEFKNGESFNLYEQELVERWNLAAASDILRISALKEIGGMYLAVAMLPGIQPDLFESIEKPSSVTVDFWEMTKLEAIMKYKEYIPEYTSEHFDMLDEEVQSSFESVLASKSDKSEIFSSLGDMEASPLEVKIAFNSKGIINQGLISVKDSYCSNLIVKQIENRYKILNNSLNPAISEDNDFNTTTNTFIDSIMAEANADNGRFMMELGKYLRVGFFPDVKTTINLSGPEAYAAAYQDLLMFKEGSMNIHLIEADLRNFEISKTNISQSTEQEMASLWSFDDARAKAQFEEYKRNYFEGSLGEDDNLDFSQNIVVDKEYLLEKISSLARSSERGYIHYIVQLQGDKISYEAACNLFAKTPYDSVLFQKNIEDSEIAYYYNPGDGEIQEIDKYKIPSIISDRPKIKLTFIGHGKDEFNTDIFAGFDVDSLSTEIEAAIDLAKEDISPKSIEINLLGANMFSYSINVEETYPGKLLLKVKDKISELMPSISQDSIIVSANQYEVRINSEGRRELLDHSGEWINKEESIIKDISSKEYISFNPKENKITVKSKNLPELSTLLQEIRNNSNSSDIELEEKVMLTECEINVISNIDTQIVEERIEEAKNLTSDSINYIKDEFKLIESISDALCDLKQQNELEDSHFISFEDISETDEGFSIRFINKETGESIFVETEKTIFSEYANHITEEISKIKGTIFDTVNGKLVKKVNLDTTHEVNTLNAAFFIQSLIEYNSSKESLSNLSVAMKVQVYAQLFSTGLNTITDAAKVVELVSTALDETIDLLPTLSEGLPIIATIIDGVSLGAAIKELSETSDPLLRQEIEAKIGIMAVNLTTATTAIITSSLGVASGFSILLVPLAGISAGIPSLVNNELVLRDKATKVVDYFKHVSLVETEGVFTLLDDKIMMPQDDLVISEIDFNNNSIVLGKCEIWRMEGGSGHTVTDDIDHFFSAPSITYREPHLSIYDVLEVQKEELDLSKDLMVLPNAPNRVFAWETGWTPGLRSLENDGTKLLDRIRDNYEGEFYWRYFAFIADALITTLKPRYEDTNIRINLDSNTRSFIVPIITTEYIREKLSYSFYGSGGTYALSLSQYNMGINIELSESDVWIIDVDNVVRDVTIESDKIKKGDLIEGILSTLSIEENKIILNSHEINFSGEVNGSNGFVSLTFSILEGINAIIEVDLLSKSYKLLISGELKILMLNSNHIQQKIDYIGFNSELQKNIPYSFVDSEGKENGFINGSTKEGLFVSELPDVVLISKVYMDDSKPSFGYYSNNLKDVKVITKDNVNILTGYYLKDDIKISLSLTLQDEKTIKLNSVHLDESGVAEILKFMNRKGSTNTSDSLMSFLESMNIKSIFVNFLQSNIKFILDANFIISGTTSIGQFEFICDENDNIQPYFIKFNTLETNYTLYVGNRQNMIVEPNYDLDDSGDISSTVINFSQKYLYGIDSCVNKVVISPNIYTDEINITPVYETNNTYPEVIVLDANYINEKINVNINDLSIRYVWSNDGNDFILMSTSEENKVSQVKIRFVNVFKDKTLANKLSFNFSDKQDVPVSEIILSFTPSYYEDGLIGYDLGLVSLYNEKFYINNFGMMVSGLIYINDSLYYFKPPVNNLITGFVTVGDDKYYFNPINGGAASIGETIIDDKNYYFNQSGVLQTGVFSTEDGFKYFAPANTLDENLEGEAIDFTGKLIIDENIYYFDDNYRGAVEWKELDGEMHYFSPETGKAFKGLNQIGDDKYYFNSDGVMQKGFVSINDNKHYFDDSGVMKVGYTEIDGKHFYFAENGEMQIGVFNTEDGFKYFAHHNEDLGNEEGEEISYSGILNFNNKIYYFDDSFTAVVGWKDLEDGSKYYFDEDTAEAYIGLSLINDGQYYFNDDGIMQVGFVTINDKVFYFSDSGIIESGVQNIDDNYFYIDDNGIVQIGVFDTSDGYKYFAPANTVNDNIYGQAVEYSGLVRVGEDVYYFGETYTIETGWIYDMENESDKYYFNPETKKACKGINLIDDIKYYFDEKGIMRTGLISFENNNYYFNENGEMQFGYINIEDKMFYFGEDGVMQIGVFNTPDGFKYFAHQNTLDENFEGESINYTGWLDLDEKRYYFTDEYIAATGSVIIDGEEYYFDPDTAQLVISE

SEQ ID NO: 742 - protein, 2366 aa, synthetic construct; identical to SEQ ID NO: 723
  REGION 1..2366: note = Synthetic amino acid sequence

SEQ ID NO: 743 - protein, 2365 aa, synthetic construct
  REGION 1..2365: note = Synthetic amino acid sequence
SLVNRKQLEKMANVRFRTQEDEYVAILDALEEYHNMSENTVVEKYLKLKDINSLTDIYIDTYKKSGRNKALKKFKEYLVTEVLELKNNNLTPVEKNLHFVWIGGQINDTAINYINQWKDVNSDYNVNVFYDSNAFLINTLKKTVVESAINDTLESFRENLNDPRFDYNKFFRKRMEIIYDKQKNFINYYKAQREENPELIIDDIVKTYLSNEYSKEIDELNTYIEESLNKITQNSGNDVRNFEEFKNGESFNLYEQELVERWNLAAASDILRISALKEIGGMYLAVAMLPGIQPDLFESIEKPSSVTVDFWEMTKLEAIMKYKEYIPEYTSEHFDMLDEEVQSSFESVLASKSDKSEIFSSLGDMEASPLEVKIAFNSKGIINQGLISVKDSYCSNLIVKQIENRYKILNNSLNPAISEDNDFNTTTNTFIDSIMAEANADNGRFMMELGKYLRVGFFPDVKTTINLSGPEAYAAAYQDLLMFKEGSMNIHLIEADLRNFEISKTNISQSTEQEMASLWSFDDSRAKAQFEEYKRNYFEGSLGEDDNLDFSQNIVVDKEYLLEKISSLARSSERGYIHYIVQLQGDKISYEAACNLFAKTPYDSVLFQKNIEDSEIAYYYNPGDGEIQEIDKYKIPSIISDRPKIKLTFIGHGKDEFNTDIFAGFDVDSLSTEIEAAIDLAKEDISPKSIEINLLGANMFSYSINVEETYPGKLLLKVKDKISELMPSISQDSIIVSANQYEVRINSEGRRELLDHSGEWINKEESIIKDISSKEYISFNPKENKITVKSKNLPELSTLLQEIRNNSNSSDIELEEKVMLTECEINVISNIDTQIVEERIEEAKNLTSDSINYIKDEFKLIESISDALCDLKQQNELEDSHFISFEDISETDEGFSIRFINKETGESIFVETEKTIFSEYANHITEEISKIKGTIFDTVNGKLVKKVNLDTTHEVNTLNAAFFIQSLIEYNSSKESLSNLSVAMKVQVYAQLFSTGLNTITDAAKVVELVSTALDETIDLLPTLSEGLPIIATIIDGVSLGAAIKELSETSDPLLRQEIEAKIGIMAVNLTTATTAIITSSLGVASGFSILLVPLAGISAGIPSLVNNELVLRDKATKVVDYFKHVSLVETEGVFTLLDDKIMMPQDDLVISEIDFNNNSIVLGKCEIWRMEGGSGHTVTDDIDHFFSAPSITYREPHLSIYDVLEVQKEELDLSKDLMVLPNAPNRVFAWETGWTPGLRSLENDGTKLLDRIRDNYEGEFYWRYFAFIADALITTLKPRYEDTNIRINLDSNTRSFIVPIITTEYIREKLSYSFYGSGGTYALSLSQYNMGINIELSESDVWIIDVDNVVRDVTIESDKIKKGDLIEGILSTLSIEENKIILNSHEINFSGEVNGSNGFVSLTFSILEGINAIIEVDLLSKSYKLLISGELKILMLNSNHIQQKIDYIGFNSELQKNIPYSFVDSEGKENGFINGSTKEGLFVSELPDVVLISKVYMDDSKPSFGYYSNNLKDVKVITKDNVNILTGYYLKDDIKISLSLTLQDEKTIKLNSVHLDESGVAEILKFMNRKGSTNTSDSLMSFLESMNIKSIFVNFLQSNIKFILDANFIISGTTSIGQFEFICDENDNIQPYFIKFNTLETNYTLYVGNRQNMIVEPNYDLDDSGDISSTVINFSQKYLYGIDSCVNKVVISPNIYTDEINITPVYETNNTYPEVIVLDANYINEKINVNINDLSIRYVWSNDGNDFILMSTSEENKVSQVKIRFVNVFKDKTLANKLSFNFSDKQDVPVSEIILSFTPSYYEDGLIGYDLGLVSLYNEKFYINNFGMMVSGLIYINDSLYYFKPPVNNLITGFVTVGDDKYYFNPINGGAASIGETIIDDKNYYFNQSGVLQTGVFSTEDGFKYFAPANTLDENLEGEAIDFTGKLIIDENIYYFDDNYRGAVEWKELDGEMHYFSPETGKAFKGLNQIGDDKYYFNSDGVMQKGFVSINDNKHYFDDSGVMKVGYTEIDGKHFYFAENGEMQIGVFNTEDGFKYFAHHNEDLGNEEGEEISYSGILNFNNKIYYFDDSFTAVVGWKDLEDGSKYYFDEDTAEAYIGLSLINDGQYYFNDDGIMQVGFVTINDKVFYFSDSGIIESGVQNIDDNYFYIDDNGIVQIGVFDTSDGYKYFAPANTVNDNIYGQAVEYSGLVRVGEDVYYFGETYTIETGWIYDMENESDKYYFNPETKKACKGINLIDDIKYYFDEKGIMRTGLISFENNNYYFNENGEMQFGYINIEDKMFYFGEDGVMQIGVFNTPDGFKYFAHQNTLDENFEGESINYTGWLDLDEKRYYFTDEYIAATGSVIIDGEEYYFDPDTAQLVISE

SEQ ID NO: 744 - protein, 2365 aa, synthetic construct; identical to SEQ ID NO: 743
  REGION 1..2365: note = Synthetic amino acid sequence

SEQ ID NO: 745 - protein, 2365 aa, synthetic construct; identical to SEQ ID NO: 743
  REGION 1..2365: note = Synthetic amino acid sequence

SEQ ID NO: 746 - protein, 2365 aa, synthetic construct
  REGION 1..2365: note = Synthetic amino acid sequence
SLVNRKQLEKMANVRFRTQEDEYVAILDALEEYHNMSENTVVEKYLKLKDINSLTDIYIDTYKKSGRNKALKKFKEYLVTEVLELKNNNLTPVEKNLHFVWIGGQINDTAINYINQWKDVNSDYNVNVFYDSNAFLINTLKKTVVESAINDTLESFRENLNDPRFDYNKFFRKRMEIIYDKQKNFINYYKAQREENPELIIDDIVKTYLSNEYSKEIDELNTYIEESLNKITQNSGNDVRNFEEFKNGESFNLYEQELVERWNLAAASDILRISALKEIGGMYLAVAMLPGIQPDLFESIEKPSSVTVDFWEMTKLEAIMKYKEYIPEYTSEHFDMLDEEVQSSFESVLASKSDKSEIFSSLGDMEASPLEVKIAFNSKGIINQGLISVKDSYCSNLIVKQIENRYKILNNSLNPAISEDNDFNTTTNTFIDSIMAEANADNGRFMMELGKYLRVGFFPDVKTTINLSGPEAYAAAYQDLLMFKEGSMNIHLIEADLRNFEIFKTNISQSTEQEMASLWSFDDSRAKAQFEEYKRNYFEGSLGEDDNLDFSQNIVVDKEYLLEKISSLARSSERGYIHYIVQLQGDKISYEAACNLFAKTPYDSVLFQKNIEDSEIAYYYNPGDGEIQEIDKYKIPSIISDRPKIKLTFIGHGKDEFNTDIFAGFDVDSLSTEIEAAIDLAKEDISPKSIEINLLGANMFSYSINVEETYPGKLLLKVKDKISELMPSISQDSIIVSANQYEVRINSEGRRELLDHSGEWINKEESIIKDISSKEYISFNPKENKITVKSKNLPELSTLLQEIRNNSNSSDIELEEKVMLTECEINVISNIDTQIVEERIEEAKNLTSDSINYIKDEFKLIESISDALCDLKQQNELEDSHFISFEDISETDEGFSIRFINKETGESIFVETEKTIFSEYANHITEEISKIKGTIFDTVNGKLVKKVNLDTTHEVNTLNAAFFIQSLIEYNSSKESLSNLSVAMKVQVYAQLFSTGLNTITDAAKVVELVSTALDETIDLLPTLSEGLPIIATIIDGVSLGAAIKELSETSDPLLRQEIEAKIGIMAVNLTTATTAIITSSLGVASGFSILLVPLAGISAGIPSLVNNELVLRDKATKVVDYFKHVSLVETEGVFTLLDDKIMMPQDDLVISEIDFNNNSIVLGKCEIWRMEGGSGHTVTDDIDHFFSAPSITYREPHLSIYDVLEVQKEELDLSKDLMVLPNAPNRVFAWETGWTPGLRSLENDGTKLLDRIRDNYEGEFYWRYFAFIADALITTLKPRYEDTNIRINLDSNTRSFIVPIITTEYIREKLSYSFYGSGGTYALSLSQYNMGINIELSESDVWIIDVDNVVRDVTIESDKIKKGDLIEGILSTLSIEENKIILNSHEINFSGEVNGSNGFVSLTFSILEGINAIIEVDLLSKSYKLLISGELKILMLNSNHIQQKIDYIGFNSELQKNIPYSFVDSEGKENGFINGSTKEGLFVSELPDVVLISKVYMDDSKPSFGYYSNNLKDVKVITKDNVNILTGYYLKDDIKISLSLTLQDEKTIKLNSVHLDESGVAEILKFMNRKGSTNTSDSLMSFLESMNIKSIFVNFLQSNIKFILDANFIISGTTSIGQFEFICDENDNIQPYFIKFNTLETNYTLYVGNRQNMIVEPNYDLDDSGDISSTVINFSQKYLYGIDSCVNKVVISPNIYTDEINITPVYETNNTYPEVIVLDANYINEKINVNINDLSIRYVWSNDGNDFILMSTSEENKVSQVKIRFVNVFKDKTLANKLSFNFSDKQDVPVSEIILSFTPSYYEDGLIGYDLGLVSLYNEKFYINNFGMMVSGLIYINDSLYYFKPPVNNLITGFVTVGDDKYYFNPINGGAASIGETIIDDKNYYFNQSGVLQTGVFSTEDGFKYFAPANTLDENLEGEAIDFTGKLIIDENIYYFDDNYRGAVEWKELDGEMHYFSPETGKAFKGLNQIGDDKYYFNSDGVMQKGFVSINDNKHYFDDSGVMKVGYTEIDGKHFYFAENGEMQIGVFNTEDGFKYFAHHNEDLGNEEGEEISYSGILNFNNKIYYFDDSFTAVVGWKDLEDGSKYYFDEDTAEAYIGLSLINDGQYYFNDDGIMQVGFVTINDKVFYFSDSGIIESGVQNIDDNYFYIDDNGIVQIGVFDTSDGYKYFAPANTVNDNIYGQAVEYSGLVRVGEDVYYFGETYTIETGWIYDMENESDKYYFNPETKKACKGINLIDDIKYYFDEKGIMRTGLISFENNNYYFNENGEMQFGYINIEDKMFYFGEDGVMQIGVFNTPDGFKYFAHQNTLDENFEGESINYTGWLDLDEKRYYFTDEYIAATGSVIIDGEEYYFDPDTAQLVISE

SEQ ID NO: 747 - protein, 2365 aa, synthetic construct; identical to SEQ ID NO: 746
  REGION 1..2365: note = Synthetic amino acid sequence

SEQ ID NO: 748 - protein, 2365 aa, synthetic construct; identical to SEQ ID NO: 717
  REGION 1..2365: note = Synthetic amino acid sequence

SEQ ID NO: 749 - protein, 2365 aa, synthetic construct
  REGION 1..2365: note = Synthetic amino acid sequence
SLVNRKQLEKMANVRFRTQEDEYVAILDALEEYHNMSENTVVEKYLKLKDINSLTDIYIDTYKKSGRNKALKKFKEYLVTEVLELKNNNLTPVEKNLHFVWIGGQINDTAINYINQWKDVNSDYNVNVFYDSNAFLINTLKKTVVESAINDTLESFRENLNDPRFDYNKFFRKRMEIIYDKQKNFINYYKAQREENPELIIDDIVKTYLSNEYSKEIDELNTYIEESLNKITQNSGNDVRNFEEFKNGESFNLYEQELVERWNLAAASDILRISALKEIGGMYLAVAMLPGIQPDLFESIEKPSSVTVDFWEMTKLEAIMKYKEYIPEYTSEHFDMLDEEVQSSFESVLASKSDKSEIFSSLGDMEASPLEVKIAFNSKGIINQGLISVKDSYCSNLIVKQIENRYKILNNSLNPAISEDNDFNTTTNTFIDSIMAEANADNGRFMMELGKYLRVGFFPDVKTTINLSGPEAYAAAYQDLLMFKEGSMNIHLIEADLRNFEISKTNISQSTEQEMASLWSFDDARAKAQFEEYKRNYFEGSLGEDDNLDFSQNIVVDKEYLLEKISSLARSSERGYIHYIVQLQGDKISYEAACNLFAKTPYDSVLFQKNIEDSEIAYYYNPGDGEIQEIDKYKIPSIISDRPKIKLTFIGHGKDEFNTDIFAGFDVDSLSTEIEAAIDLAKEDISPKSIEINLLGANMFSYSINVEETYPGKLLLKVKDKISELMPSISQDSIIVSANQYEVRINSEGRRELLDHSGEWINKEESIIKDISSKEYISFNPKENKITVKSKNLPELSTLLQEIRNNSNSSDIELEEKVMLTECEINVISNIDTQIVEERIEEAKNLTSDSINYIKDEFKLIESISDALCDLKQQNELEDSHFISFEDISETEEGFSIRFINKETGESIFVETEKTIFSEYANHITEEISKIKGTIFDTVNGKLVKKVNLDTTHEVNTLNAAFFIQSLIEYNSSKESLSNLSVAMKVQVYAQLFSTGLNTITDAAKVVELVSTALDETIDLLPTLSEGLPIIATIIDGVSLGAAIKELSETSDPLLRQEIEAKIGIMAVNLTTATTAIITSSLGIASGFSILLVPLAGISAGIPSLVNNELVLRDKATKVVDYFKHVSLVETEGVFTLLDDKIMMPQDDLVISEIDFNNNSIVLGKCEIWRMEGGSGHTVTDDIDHFFSAPSITYREPHLSIYDVLEVQKEELDLSKDLMVLPNAPNRVFAWETGWTPGLRSLENDGTKLLDRIRDNYEGEFYWRYFAFIADALITTLKPRYEDTNIRINLDSNTRSFIVPIITTEYIREKLSYSFYGSGGTYALSLSQYNMGINIELSESDVWIIDVDNVVRDVTIESDKIKKGDLIEGILSTLSIEENKIILNSHEINFSGEVNGSNGFVSLTFSILEGINAIIEVDLLSKSYKLLISGELKILMLNSNHIQQKIDYIGFNSELQKNIPYSFVDSEGKENGFINGSTKEGLFVSELPDVVLISKVYMDDSKPSFGYYSNNLKDVKVITKDNVNILTGYYLKDDIKISLSLTLQDEKTIKLNSVHLDESGVAEILKFMNRKGNTNTSDSLMSFLESMNIKSIFVNFLQSNIKFILDANFIISGTTSIGQFEFICDENDNIQPYFIKFNTLETNYTLYVGNRQNMIVEPNYDLDDSGDISSTVINFSQKYLYGIDSCVNKVVISPNIYTDEINITPVYETNNTYPEVIVLDANYINEKINVNINDLSIRYVWSNDGNDFILMSTSEENKVSQVKIRFVNVFKDKTLANKLSFNFSDKQDVPVSEIILSFTPSYYEDGLIGYDLGLVSLYNEKFYINNFGMMVSGLIYINDSLYYFKPPVNNLITGFVTVGDDKYYFNPINGGAASIGETIIDDKNYYFNQSGVLQTGVFSTEDGFKYFAPANTLDENLEGEAIDFTGKLIIDENIYYFEDNYRGAVEWKELDGEMHYFSPETGKAFKGLNQIGDDKYYFNSDGVMQKGFVSINDNKHYFDDSGVMKVGYTEIDGKYFYFAENGEMQIGVFNTEDGFKYFAHHNEDLGNEEGEEISYSGILNFNNKIYYFDDSFTAVVGWKDLEDGSKYYFDEDTAEAYIGLSLINDGQYYFNDDGIMQVGFVTINDKVFYFSDSGIIESGVQNIDDNYFYIDDNGIVQIGVFDTSDGYKYFAPANTVNDNIYGQAVEYSGLVRVGEDVYYFGETYTIETGWIYDMENESDKYYFNPETKKACKGINLIDDIKYYFDEKGIMRTGLISFENNNYYFNENGEMQFGYINIEDKMFYFGEDGVMQIGVFNTPDGFKYFAHQNTLDENFEGESINYTGWLDLDEKRYYFTDEYIAATGSVIIDGEEYYFDPDTAQLVISE

SEQ ID NO: 750 - protein, 2365 aa, synthetic construct; identical to SEQ ID NO: 738
  REGION 1..2365: note = Synthetic amino acid sequence

SEQ ID NO: 751 - protein, 2365 aa, synthetic construct
  REGION 1..2365: note = Synthetic amino acid sequence
SLVNRKQLEKMANVRFRTQEDEYVAILDALEEYHNMSENTVVEKYLKLKDINSLTDIYIDTYKKSGRNKALKKFKEYLVTEVLELKNNNLTPVEKNLHFVWIGGQINDTAINYINQWKDVNSDYNVNVFYDSNAFLINTLKKTIVESAINDTLESFRENLNNPRFDYNKFFRKRMEIIYDKQKNFINYYKAQREENPELIIDDIVKIYLSNEYSKEIDELNTYIEESLNKIKQNSGNDVRNFEEFKNGESFKLYEQELVERWNLAAASDILRISALKEIGGMYLAVAMLPGIQPGLFESIEKPSSVTVDFWEMTKLEAIMKYKEYIPGYTSEHFDMLDEEVQSSFESALASKSDKSEIFSSLGDMEASPLEVKIAFNSKGIINQGLISVKDSYCSNLIVKQIENRYKILNNSLNPAISEDNDFNTTTNTFIDSIMAEANADNGRFMMELGKYLRVGFFPDVKTTVNLSGPEAYAAAYQDLLMFKEGSMNIHLIEADLRNFEISKTNISQSTEQEMASLWTFDDARAKVQFEEYKRNYFEGSLGEDDNLDFSQNIVVDKEYLLEKISSLARSSERGYIHYIVQLQGDKISYEAACNLFAKTPYDSILFQKNIENSEVAYYYNPGDGEIQEIDKYRIPSIISDRPKIKLTFIGHGKDEFNTDIFAGLDVDSLSTEIETAIDLAKEDISSKSIEINLLGANMFSYSINVEETYPGKLLLKVKDKISELMPSISQDSIIVSANQYEVRINNEGRRELLDHSGEWINKEESIIKDISSKEYISFNPKENKITVKSKNLPELSTLLQEIRNNSNLSDIELEEKVMLAECEINVISNIDTQIVEERIEEAKNLTSDSINYIKNEFKLIESISDSLYDLKQQNELDDSHFISFEDISKTEDGFSIRFINKETGESIFVETEKEIFSEYANHIRGEISNIKDTIFDTVNGKLVKKVNLDAIHEVNTLNAAFFIQSLIGYSSSKESLSNLSVAMKVQVYAQLFSTGLNTITDAAKVVELVSTALDETIDLLPTLSEGLPVIATIIDGVSLGAAIKELSETSDPLLRQEIEAKIGIMAVNLTAATTAIITSSLGVASGFSILLVPLAGISAGIPSLVNNELVLRDKATKVVDYFKHISLVETEGAFTLLDDKIMIPQDDLVISEIDFNNNSIVLGKCEIWRMEGGSGHTVTNDIDHFFSSPTITYIKPHLSIYDVLEVQKEELDLSKDLMVLPNAPNRVFAWETGWTPGLRSLENEGTKLLDRIRDHYKGEFYWRYFAFIADALITTLKPRYEDTNIRINLDSNNRSFIVPIITTEHIREKLSYSFHGSGGTYALSLSQYNMGINIELSESDVWIIDVDNVVRDVTIDSDKIKKGDLIEGILSTLSIEDNKIILNHHEINFSGDVNGSNGFISLTFSILEGINAIIEVDLLSKSYKLLISGELKILMLNSNHIQQKIDYIGFNSELQKNIPYSFVDSEGKENGFINGSTKEGLFVSELPDVVLISKVYMDDSKPSFGYYSNNLKDVKVITKDNVNILTGYYLKDDIKISLSFTLQDEKTIKLNGVHLDESGVAEILKFMNKKGSTNTSDSLMSFLESVNIKSIFVNFLQSKINFILDANFIISGTTSIGQFEFICDENDNIQPYFIKFNTLETTYTLYVGNRQNMIVEPNYDLDDSGDISSTVINFSQKYLYGIDSCVNKVVISPNIYTDEINITPVYETNNNYPEVIVLDANYINEKINVNINDLSIRYVWSNDGNDFILMSTSEENKVSQVKIRFVNVFKDKTLANKLSFNFSDKQDVPVSEIISAFTPSYYEDGLIGYDLGLVSLYNEKFYINNFGMMVSGLIYINDSLYYFKPPVNNLITGFVTVGDDKYYFNPTNGGAASIGETIINDKNYYFNQSGILQTGVFSTEDGLKYFAPANTLDENLEGEAIDFTGKLIIDENIYYFEDNYRGAVEWKELDGEMYYFSPETGKAFKGLNQIGDDKYYFNSDGIMQKGFVSINDKKYYFDDSGVMKVGYIEIDGKYFYFAENGEMQIGVFNTSDGFKYFAHHNEDLGNEEGEAISYSGILNFNNKIYYFDYSFTAVVGWKDLEDGSKYYFDEDTAEAYVGLSLINDGQYYFNDDGIMQVGFVTINNKVFYFSDSGIIESGVQNIDDNYFYIDEKGIVQIGVFDTSDEYKYFAPANTVNDNIYGQAVDYSGLVRVGEDIYYFGETYTIETGWIYDMENESDKYYFNPETKKACKGINLIDDIKYYFDENGIMRTGLISFENNDYYFNENGEMQFGYINIEDKMFYFGEDGVMQIGVFNTQDGFKYFAHQNTLDENFEGESINYTGWLDLDEKRYYFTDEYIAATGSVIIDGEEYYFDPDTAQLVISE

SEQ ID NO: 752 - protein, 2365 aa, synthetic construct; identical to SEQ ID NO: 751
  REGION 1..2365: note = Synthetic amino acid sequence

SEQ ID NO: 753 - protein, 2365 aa, synthetic construct
  REGION 1..2365: note = Synthetic amino acid sequence
SLVNRKQLEKMANVRFRTQEDEYVAILDALEEYHNMSENTVVEKYLKLKDINSLTDIYIDTYKKSGRNKALKKFKEYLVTEVLELKNNNLTPVEKNLHFVWIGGQINDTAINYINQWKDVNSDYNVNVFYDSNAFLINTLKKTIVESAINDTLESFRENLNNPRFDYNKFFRKRMEIIYDKQKNFINYYKAQREENPELIIDDIVKIYLSNEYSKEIDELNTYIEESLNKIKQNSGNDVRNFEEFKNGESFKLYEQELVERWNLAAASDILRISALKEIGGMYLAVAMLPGIQPDLFESIEKPSSVTVDFWEMTKLEAIMKYKEYIPGYTSEHFDMLDEEVQSSFESALASKSDKSEIFSSLGDMEASPLEVKIAFNSKGIINQGLISVKDSYCSNLIVKQIENRYKILNNSLNPAISEDNDFNTTTNTFIDSIMAEANADNGRFMMELGKYLRVGFFPDVKTTVNLSGPEAYAAAYQDLLMFKEGSMNIHLIEADLRNFEISKTNISQSTEQEMASLWTFDDARAKVQFEEYKRNYFEGSLGEDDNLDFSQNIVVDKEYLLEKISSLARSSERGYIHYIVQLQGDKISYEAACNLFAKTPYDSILFQKNIENSEVAYYYNPGDGEIQEIDKYRIPSIISDRPKIKLTFIGHGKDEFNTDIFAGLDVDSLSTEIETAIDLAKEDISSKSIEINLLGANMFSYSINVEETYPGKLLLKVKDKISELMPSISQDSIIVSANQYEVRINNEGRRELLDHSGEWINKEESIIKDISSKEYISFNPKENKITVKSKNLPELSTLLQEIRNNSNLSDIELEEKVMLAECEINVISNIDTQIVEERIEEAKNLTSDSINYIKNEFKLIESISDSLYDLKQQNELDDSHFISFEDISKTEDGFSIRFINKETGESIFVETEKEIFSEYANHIRREISNIKDTIFDTVNGKLVKKVNLDAIHEVNTLNAAFFIQSLIGYSSSKESLSNLSVAMKVQVYAQLFSTGLNTITDAAKVVELVSTALDETIDLLPTLSEGLPVIATIIDGVSLGAAIKELSETSDPLLRQEIEAKIGIMAVNLTAATTAIITSSLGIASGFSILLVPLAGISAGIPSLVNNELVLRDKATKVVDYFKHISLVETEGAFTLLDDKIMIPQDDLVISEIDFNNNSIVLGKCEIWRMEGGSGHTVTNDIDHFFSSPTITYIKPHLSIYDVLEVQKEELDLSKDLMVLPNAPNRVFAWETGWTPGLRSLENEGTKLLDRIRDHYKGEFYWRYFAFIADALITTLKPRYEDTNIRINLDSNNRSFIVPIITTEHIREKLSYSFHGSGGTYALSLSQYNMGINIELSESDVWIIDVDNVVRDVTIDSDKIKKGDLIEGILSTLSIEDNKIILNHHEINFSGDVNGSNGFISLTFSILEGINAIIEVDLLSKSYKLLISGELKILMLNSNHIQQKIDYIGFNSELQKNIPYSFVDSEGKENGFINGSTKEGLFVSELPDVVLISKVYMDDSKPSFGYYSNNLKDVKVITKDNVNILTGYYLKDDIKISLSFTLQDEKTIKLNGVHLDESGVAEILKFMNKKGSTNTSDSLMSFLESVNIKSIFVNFLQSKINFILDANFIISGTTSIGQFEFICDENDNIQPYFIKFNTLETTYTLYVGNRQNMIVEPNYDLDDSGDISSTVINFSQKYLYGIDSCVNKVVISPNIYTDEINITPVYETNNNYPEVIVLDANYINEKINVNINDLSIRYVWSNDGNDFILMSTSEENKVSQVKIRFVNVFKDKTLANKLSFNFSDKQDVPVSEIISAFTPSYYEDGLIGYDLGLVSLYNEKFYINNFGMMVSGLIYINDSLYYFKPPVNNLITGFVTVGDDKYYFNPTNGGAASIGETIINDKNYYFNQSGILQTGVFSTEDGLKYFAPANTLDENLEGEAIDFTGKLIIDENIYYFEDNYRGAVEWKELDGEMYYFSPETGKAFKGLNQIGDDKYYFNSDGIMQKGFVSINDKKYYFDDSGVMKVGYIEIDGKYFYFAENGEMQIGVFNTSDGFKYFAHHNEDLGNEEGEAISYSGILNFNNKIYYFDYSFTAVVGWKDLEDGSKYYFDEDTAEAYVGLSLINDGQYYFNDDGIMQVGFVTINNKVFYFSDSGIIESGVQNIDDNYFYIDEKGIVQIGVFDTSDEYKYFAPANTVNDNIYGQAVDYSGLVRVGEDIYYFGETYTIETGWIYDMENESDKYYFNPETKKACKGINLIDDIKYYFDENGIMRTGLISFENNDYYFNENGEMQFGYINIEDKMFYFGEDGVMQIGVFNTQDGFKYFAHQNTLDENFEGESINYTGWLDLDEKRYYFTDEYIAATGSVIIDGEEYYFDPDTAQLVISE

SEQ ID NO: 754 - protein, 2365 aa, synthetic construct; identical to SEQ ID NO: 751
  REGION 1..2365: note = Synthetic amino acid sequence

SEQ ID NO: 755 - protein, 2365 aa, synthetic construct; identical to SEQ ID NO: 753
  REGION 1..2365: note = Synthetic amino acid sequence

SEQ ID NO: 756 - protein, 2365 aa, synthetic construct; identical to SEQ ID NO: 753
  REGION 1..2365: note = Synthetic amino acid sequence

SEQ ID NO: 757 - protein, 2365 aa, synthetic construct; identical to SEQ ID NO: 718
  REGION 1..2365: note = Synthetic amino acid sequence

SEQ ID NO: 758 - protein, 2365 aa, synthetic construct; identical to SEQ ID NO: 751
  REGION 1..2365: note = Synthetic amino acid sequence

SEQ ID NO: 759 - protein, 2365 aa, synthetic construct; identical to SEQ ID NO: 753
  REGION 1..2365: note = Synthetic amino acid sequence

SEQ ID NO: 760 - protein, 2365 aa, synthetic construct
  REGION 1..2365: note = Synthetic amino acid sequence
SLVNRKQLEKMANVRFRTQEDEYVAILDALEEYHNMSENTVVEKYLKLKDINSLTDIYIDTYKKSGRNKALKKFKEYLVIEVLELKNNNLTPVEKNLHFVWIGGQINDTAINYINQWKDVNSDYNVNVFYDSNAFLINTLKKTIVESAINDTLESFRENLNNPRFDYNKFFRKRMEIIYDKQKNFINYYKAQREENPELIIDDIVKIYLSNEYSKEIDELNTYIEESLNKIKQNSGNDVRNFEEFKNGESFKLYEQELVERWNLAAASDILRISALKEIGGMYLAVAMLPGIQPGLFESIEKPSSVTVDFWEMTKLEAIMKYKEYIPGYTSEHFDMLDEEVQSSFESALASKSDKSEIFSSLGDMEASPLEVKIAFNSKGIINQGLISVKDSYCSNLIVKQIENRYKILNNSLNPAISEDNDFNTTTNTFIDSIMAEANADNGRFMMELGKYLRVGFFPDVKTTVNLSGPEAYAAAYQDLLMFKEGSMNIHLIEADLRNFEISKTNISQSTEQEMASLWTFDDARAKVQFEEYKRNYFEGSLGEDDNLDFSQNIVVDKEYLLEKISSLARSSERGYIHYIVQLQGDKISYEAACNLFAKTPYDSILFQKNIENSEVAYYYNPGDGEIQEIDKYRIPSIISDRPKIKLTFIGHGKDEFNTDIFAGLDVDSLSTEIETAIDLAKEDISSKSIEINLLGANMFSYSINVEETYPGKLLLKVKDKISELMPSISQDSIIVSANQYEVRINNEGRRELLDHSGEWINKEESIIKDISSKEYISFNPKENKITVKSKNLPELSTLLQEIRNNSNLSDIELEEKVMLAECEINVISNIDTQIVEERIEEAKNLTSDSINYIKNEFKLIESISDSLYDLKQQNELDDSHFISFEDISKTEDGFSIRFINKETGESIFVETEKEIFSEYANHIRGEISNIKDTIFDTVNGKLVKKVNLDAIHEVNTLNAAFFIQSLIGYSSSKESLSNLSVAMKVQVYAQLFSTGLNTITDAAKVVELVSTALDETIDLLPTLSEGLPVIATIIDGVSLGAAIKELSETSDPLLRQEIEAKIGIMAVNLTAATTAIITSSLGVASGFSILLVPLAGISAGIPSLVNNELVLRDKATKVVDYFKHISLVETEGAFTLLDDKIMIPQDDLVISEIDFNNNSIVLGKCEIWRMEGGSGHTVTNDIDHFFSSPTITYIKPHLSIYDVLEVQKEELDLSKDLMVLPNAPNRVFAWETGWTPGLRSLENEGTKLLDRIRDHYKGEFYWRYFAFIADALITTLKPRYEDTNIRINLDSNNRSFIVPIITTEHIREKLSYSFHGSGGTYALSLSQYNMGINIELSESDVWIIDVDNVVRDVTIDSDKIKKGDLIEGILSTLSIEDNKIILNHHEINFSGDVNGSNGFISLTFSILEGINAIIEVDLLSKSYKLLISGELKILMLNSNHIQQKIDYIGFNSELQKNIPYSFVDSEGKENGFINGSTKEGLFVSELPDVVLISKVYMDDSKPSFGYYSNNLKDVKVITKDNVNILTGYYLKDDIKISLSFTLQDEKTIKLNGVHLDESGVAEILKFMNKKGSTNTSDSLMSFLESVNIKSIFVNFLQSKINFILDANFIISGTTSIGQFEFICDENDNIQPYFIKFNTLETTYTLYVGNRQNMIVEPNYDLDDSGDISSTVINFSQKYLYGIDSCVNKVVISPNIYTDEINITPVYETNNNYPEVIVLDANYINEKINVNINDLSIRYVWSNDGNDFILMSTSEENKVSQVKIRFVNVFKDKTLANKLSFNFSDKQDVPVSEIISAFTPSYYEDGLIGYDLGLVSLYNEKFYINNFGMMVSGLIYINDSLYYFKPPVNNLITGFVTVGDDKYYFNPTNGGAASIGETIINDKNYYFNQSGILQTGVFSTEDGLKYFAPANTLDENLEGEAIDFTGKLIIDENIYYFEDNYRGAVEWKELDGEMYYFSPETGKAFKGLNQIGDDKYYFNSDGIMQKGFVSINDKKYYFDDSGVMKVGYIEIDGKYFYFAENGEMQIGVFNTSDGFKYFAHHNEDLGNEEGEAISYSGILNFNNKIYYFDYSFTAVVGWKDLEDGSKYYFDEDTAEAYVGLSLINDGQYYFNDDGIMQVGFVTINNKVFYFSDSGIIESGVQNIDDNYFYIDEKGIVQIGVFDTSDEYKYFAPANTVNDNIYGQAVDYSGLVRVGEDIYYFGETYTIETGWIYDMENESDKYYFNPETKKACKGINLIDDIKYYFDENGIMRTGLISFENNDYYFNENGEMQFGYINIEDKMFYFGEDGVMQIGVFNTQDGFKYFAHQNTLDENFEGESINYTGWLDLDEKRYYFTDEYIAATGSVIIDGEEYYFDPDTAQLVISE

SEQ ID NO: 761 - protein, 2365 aa, synthetic construct; identical to SEQ ID NO: 86
  REGION 1..2365: note = Synthetic amino acid sequence

SEQ ID NO: 762 - protein, 2710 aa, Clostridium difficile
MSLISKEELIKLAYSIRPRENEYKTILTNLDEYNKLTTNNNENKYLQLKKLNESIDVFMNKYKTSSRNRALSNLKKDILKEVILIKNSNTSPVEKNLHFVWIGGEVSDIALEYIKQWADINAEYNIKLWYDSEAFLVNTLKKAIVESSTTEALQLLEEEIQNPQFDNMKFYKKRMEFIYDRQKRFINYYKSQINKPTVPTIDDIIKSHLVSEYNRDETVLESYRTNSLRKINSNHGIDIRANSLFTEQELLNIYSQELLNRGNLAAASDIVRLLALKNFGGVYLDVDMLPGIHSDLFKTISRPSSIGLDRWEMIKLEAIMKYKKYINNYTSENFDKLDQQLKDNFKLIIESKSEKSEIFSKLENLNVSDLEIKIAFALGSVINQALISKQGSYLTNLVIEQVKNRYQFLNQHLNPAIESDNNFTDTTKIFHDSLFNSATAENSMFLTKIAPYLQVGFMPEARSTISLSGPGAYASAYYDFINLQENTIEKTLKASDLIEFKFPENNLSQLTEQEINSLWSFDQASAKYQFEKYVRDYTGGSLSEDNGVDFNKNTALDKNYLLNNKIPSNNVEEAGSKNYVHYIIQLQGDDISYEATCNLFSKNPKNSIIIQRNMNESAKSYFLSDDGESILELNKYRIPERLKNKEKVKVTFIGHGKDEFNTSEFARLSVDSLSNEISSFLDTIKLDISPKNVEVNLLGCNMFSYDFNVEETYPGKLLLSIMDKITSTLPDVNKNSITIGANQYEVRINSEGRKELLAHSGKWINKEEAIMSDLSSKEYIFFDSIDNKLKAKSKNIPGLASISEDIKTLLLDASVSPDTKFILNNLKLNIESSIGDYIYYEKLEPVKNIIHNSIDDLIDEFNLLENVSDELYELKKLNNLDEKYLISFEDISKNNSTYSVRFINKSNGESVYVETEKEIFSKYSEHITKEISTIKNSIITDVNGNLLDNIQLDHTSQVNTLNAAFFIQSLIDYSSNKDVLNDLSTSVKVQLYAQLFSTGLNTIYDSIQLVNLISNAVNDTINVLPTITEGIPIVSTILDGINLGAAIKELLDEHDPLLKKELEAKVGVLAINMSLSIAATVASIVGIGAEVTIFLLPIAGISAGIPSLVNNELILHDKATSVVNYFNHLSESKKYGPLKTEDDKILVPIDDLVISEIDFNNNSIKLGTCNILAMEGGSGHTVTGNIDHFFSSPSISSHIPSLSIYSAIGIETENLDFSKKIMMLPNAPSRVFWWETGAVPGLRSLENDGTRLLDSIRDLYPGKFYWRFYAFFDYAITTLKPVYEDTNIKIKLDKDTRNFIMPTITTNEIRNKLSYSFDGAGGTYSLLLSSYPISTNINLSKDDLWIFNIDNEVREISIENGTIKKGKLIKDVLSKIDINKNKLIIGNQTIDFSGDIDNKDRYIFLTCELDDKISLIIEINLVAKSYSLLLSGDKNYLISNLSNIIEKINTLGLDSKNIAYNYTDESNNKYFGAISKTSQKSIIHYKKDSKNILEFYNDSTLEFNSKDFIAEDINVFMKDDINTITGKYYVDNNTDKSIDFSISLVSKNQVKVNGLYLNESVYSSYLDFVKNSDGHHNTSNFMNLFLDNISFWKLFGFENINFVIDKYFTLVGKTNLGYVEFICDNNKNIDIYFGEWKTSSSKSTIFSGNGRNVVVEPIYNPDTGEDISTSLDFSYEPLYGIDRYINKVLIAPDLYTSLININTNYYSNEYYPEIIVLNPNTFHKKVNINLDSSSFEYKWSTEGSDFILVRYLEESNKKILQKIRIKGILSNTQSFNKMSIDFKDIKKLSLGYIMSNFKSFNSENELDRDHLGFKIIDNKTYYYDEDSKLVKGLININNSLFYFDPIEFNLVTGWQTINGKKYYFDINTGAALISYKIINGKHFYFNNDGVMQLGVFKGPDGFEYFAPANTQNNNIEGQAIVYQSKFLTLNGKKYYFDNDSKAVTGWRIINNEKYYFNPNNAIAAVGLQVIDNNKYYFNPDTAIISKGWQTVNGSRYYFDTDTAIAFNGYKTIDGKHFYFDSDCVVKIGVFSTSNGFEYFAPANTYNNNIEGQAIVYQSKFLTLNGKKYYFDNNSKAVTGWQTIDSKKYYFNTNTAEAATGWQTIDGKKYYFNTNTAEAATGWQTIDGKKYYFNTNTAIASTGYTIINGKHFYFNTDGIMQIGVFKGPNGFEYFAPANTDANNIEGQAILYQNEFLTLNGKKYYFGSDSKAVTGWRIINNKKYYFNPNNAIAAIHLCTINNDKYYFSYDGILQNGYITIERNNFYFDANNESKMVTGVFKGPNGFEYFAPANTHNNNIEGQAIVYQNKFLTLNGKKYYFDNDSKAVTGWQTIDGKKYYFNLNTAEAATGWQTIDGKKYYFNLNTAEAATGWQTIDGKKYYFNTNTFIASTGYTSINGKHFYFNTDGIMQIGVFKGPNGFEYFAPANTHNNNIEGQAILYQNKFLTLNGKKYYFGSDSKAVTGLRTIDGKKYYFNTNTAVAVTGWQTINGKKYYFNTNTSIASTGYTIISGKHFYFNTDGIMQIGVFKGPDGFEYFAPANTDANNIEGQAIRYQNRFLYLHDNIYYFGNNSKAATGWVTIDGNRYYFEPNTAMGANGYKTIDNKNFYFRNGLPQIGVFKGSNGFEYFAPANTDANNIEGQAIRYQNRFLHLLGKIYYFGNNSKAVTGWQTINGKVYYFMPDTAMAAAGGLFEIDGVIYFFGVDGVKAPGIYG

SEQ ID NO: 763 - protein, 2710 aa, Clostridium difficile; identical to SEQ ID NO: 107

SEQ ID NO: 764 - protein, 2710 aa, Clostridium difficile; identical to SEQ ID NO: 136

SEQ ID NO: 765 - protein, 2710 aa, Clostridium difficile; identical to SEQ ID NO: 140

SEQ ID NO: 766 - protein, 2710 aa, Clostridium difficile; identical to SEQ ID NO: 151

SEQ ID NO: 767 - protein, 2710 aa, Clostridium difficile; identical to SEQ ID NO: 15

SEQ ID NO: 768 - protein, 2710 aa, Clostridium difficile; identical to SEQ ID NO: 100

SEQ ID NO: 769 - protein, 2710 aa, Clostridium difficile; identical to SEQ ID NO: 135

SEQ ID NO: 770 - protein, 2710 aa, Clostridium difficile; identical to SEQ ID NO: 88

SEQ ID NO: 771 - protein, 2710 aa, Clostridium difficile; identical to SEQ ID NO: 178

SEQ ID NO: 772 - protein, 2710 aa, Clostridium difficile; identical to SEQ ID NO: 92

SEQ ID NO: 773 - protein, 2710 aa, Clostridium difficile; identical to SEQ ID NO: 95

SEQ ID NO: 774 - protein, 2710 aa, Clostridium difficile; identical to SEQ ID NO: 97

SEQ ID NO: 775 - protein, 2710 aa, Clostridium difficile; identical to SEQ ID NO: 98

SEQ ID NO: 776 - protein, 2710 aa, Clostridium difficile; identical to SEQ ID NO: 102

SEQ ID NO: 777 - protein, 2710 aa, Clostridium difficile; identical to SEQ ID NO: 157

SEQ ID NO: 778 - protein, 2710 aa, Clostridium difficile; identical to SEQ ID NO: 150

SEQ ID NO: 779 - protein, 2710 aa, Clostridium difficile
MSLISKEELIKLAYSIRPRENEYKTILTNLDEYNKLTTNNNENKYLQLKKLNESIDVFMNKYKNSSRNRALSNLKKDILKEVILIKNSNTSPVEKNLHFVWIGGEVSDIALEYIKQWADINAEYNIKLWYDSEAFLVNTLKKAIVESSTTEALQLLEEEIQNPQFDNMKFYKKRMEFIYDRQKRFINYYKSQINKPTVPTIDDIIKSHLVSEYNRDETLLESYRTNSLRKINSNHGIDIRANSLFTEQELLNIYSQELLNRGNLAAASDIVRLLALKNFGGVYLDVDMLPGIHSDLFKTISRPSSIGLDRWEMIKLEAIMKYKKYINNYTSENFDKLDQQLKDNFKLIIESKSEKSEIFSKLENLNVSDLEIKIAFALGSVINQALISKQGSYLTNLVIEQVKNRYQFLNQHLNPAIESDNNFTDTTKIFHDSLFNSATAENSMFLTKIAPYLQVGFMPEARSTISLSGPGAYASAYYDFINLQENTIEKTLKASDLIEFKFPENNLSQLTEQEINSLWSFDQASAKYQFEKYVRDYTGGSLSEDNEVDFNKNTALDKNYLLNNKIPSNNVEEAGSKNYVHYIIQLQGDDISYEATCNLFSKNPKNSIIIQRNMNESAKSYFLSDDGESILELNKYRIPERLKNKEKVKVTFIGHGKDEFNTSEFARLSVDSLSNEISSFLDTIKLDISPKNVEVNLLGCNMFSYDFNVEETYPGKLLLSIMDKITSTLPDVNKDSITIGANQYEVRINSEGRKELLAHSGKWINKEEAIMSDLSSKEYIFFDSIDNKLKAKSKNIPGLASISEDIKTLLLDASVSPDTKFILNNLKLNIESSIGDYIYYEKLEPVKNIIHNSIDDLIDEFNLLENVSDELYELKKLNNLDEKYLISFEDISKNNSTYSVRFINKSNGESVYVETEKEIFSKYSEHITKEISTIKNSIITDVNGNLLDNIQLDHTSQVNTLNAAFFIQSLIDYSSNKDVLNDLSTSVKVQLYAQLFSTGLNTIYDSIQLVNLISNAVNDTINVLPTITEGIPIVSTILDGINLGAAIKELLDEHDPLLKKELEAKVGVLAINMSLSIAATVASIVGIGAEVTIFLLPIAGISAGIPSLVNNELILHDKATSVVNYFNHLSESKEYGPLKTEDDKILVPIDDLVISEIDFNNNAIKLGTCNILAMEGGSGHTVTGNIDHFFSSPSISSHIPSLSIYSAIGIKTENLDFSKKIMMLPNAPSRVFWWETGAVPGLRSLENNGTKLLDSIRDLYPGKFYWRFYAFFDYAITTLKPVYEDTNIKIKLDKDTRNFIMPTITTNEIRNKLSYSFDGAGGTYSLLLSSYPISTNINLSKDDLWIFNIDNEVREISIENGTIKKGKLIKDVLSKIDINKNKLIIGNQTIDFSGDIDNKDRYIFLTCELDDKISLIIEINLVAKSYSLLLSGDKNYLISNLSNTIEKINTLGLDSKNIAYNYTDESNNKYFGAISKTSQKSIIHYKKDSKNILEFYNGSTLEFNSKDFIAEDINVFMKDDINTITGKYYVDNNTDKSIDFSISLVSKNQVKVNGLYLNESVYSSYLDFVKNSDGHHNTSNFMNLFLDNISFWKLFGFENINFVVDKYFTLVGKTNLGYVEFICDNNKNIDIYFGEWKTSSSKSTIFSGNGRNVVVEPIYNPDTGEDISTSLDFSYEPLYGIDRYINKVLIAPDLYTSLININTNYYSNEYYPEIIVLNPNTFHKKVNINLDSSSFEYKWSTEGSDFILVRYLEESNKKILQKIRIKGILSNTQSFNKMSIDFKDIKKLSLVYIMSNFKSFNSENELDRDHLGFKIIDNKTYYYDEASKLVKGLININNSLFYFDPIESNLVTGWQTINGKKYYFDINTGAASTSYKIINGKHFYFNNNGVMQLGVFKGPDGFEYFAPANTQNNNIEGQAIVYQSKFLTLNGKKYYFDNNSKAVTGWRIINNEKYYFNPNNAIAAVGLQVIDNNKYYFNPDTAIISKGWQTVNGSRYYFDTDTAIAFNGYKTIDGKHFYFDSDCVVKIGVFSGSNGFEYFAPANTYNNNIEGQAIVYQSKFLTLNGKKYYFDNNSKAVTGWQTIDSKKYYFNTNTAEAATGWQTIDGKKYYFNTNTAEAATGWQTIDGKKYYFNTNTSIASTGYTIINGKHFYFNTDGIMQIGVFKGPNGFEYFAPANTHNNNIEGQAILYQNKFLTLNGKKYYFGSDSKAITGWQTIDGKKYYFNPNNAIAATHLCTINNDKYYFSYDGILQNGYITIERNNFYFDANNESKMVTGVFKGPNGFEYFAPANTHNNNIEGQAIVYQNKFLTLNGKKYYFDNDSKAVTGWQTIDGKKYYFNLNTAVAVTGWQTIDGKKYYFNLNTAEAATGWQTIDGKKYYFNTNTFIASTGYTIINGKHFYFNTDGIMQIGVFKGTNGFEYFAPANTHNNNIEGQAILYQNKFLTLNGKKYYFGSDSKAVTGLRTIDGKKYYFNTNTAVAVTGWQTINGKKYYFNTNTSIASTGYTIISGKHFYFNTDGIMQIGVFKGSDGFEYFAPANTDANNIEGQAIRYQNRFLYLHDNIYYFGNNSKAVTGWATIDGNRYYFEPDTAMGTNGYKTIDNKNFYFRNGLPQIGVFKGPNGFEYFAPANTDANNIDGQAIRYQNRFLHLLGNIYYFGNNSKAVTGWQTINGKVYYFMPDTAMAAAGGLFEIDGVIYFFGVDGVKAPGIYG

SEQ ID NO: 780 - protein, 2710 aa, Clostridium difficile
MSLISKEELIKLAYSIRPRENEYKTILTNLDEYNKLTTNNNENKYLQLKKLNESIDVFMNKYKNSSRNRALSNLKKDILKEVILIKNSNTSPVEKNLHFVWIGGEVSDIALEYIKQWADINAEYNIKLWYDSEAFLVNTLKKAIVESSTTEALQLLEEEIQNPQFDNMKFYKKRMEFIYDRQKRFINYYKSQINKPTVPTIDDIIKSHLVSEYNRDETLLESYRTNSLRKINSNHGIDIRANSLFTEQELLNIYSQELLNRGNLAAASDIVRLLALKNFGGVYLDVDMLPGIHSDLFKTIPRPSSIGLDRWEMIKLEAIMKYKKYINNYTSENFDKLDQQLKDNFKLIIESKSEKSEIFSKLENLNVSDLEIKIAFALGSVINQALISKQGSYLTNLVIEQVKNRYQFLNQHLNPAIESDNNFTDTTKIFHDSLFNSATAENSMFLTKIAPYLQVGFMPEARSTISLSGPGAYASAYYDFINLQENTIEKTLKASDLIEFKFPENNLSQLTEQEINSLWSFDQASAKYQFEKYVRDYTGGSLSEDNGVDFNKNTALDKNYLLNNKIPSNNVEEAGSKNYVHYIIQLQGDDISYEATCNLFSKNPKNSIIIQRNMNESAKSYFLSDDGESILELNKYRIPERLKNKEKVKVTFIGHGKDEFNTSEFARLSVDSLSNEISSFLDTIKLDISPKNVEVNLLGCNMFSYDFNVEETYPGKLLLSIMDKITSTLPDVNKDSITIGANQYEVRINSEGRKELLAHSGKWINKEEAIMSDLSSKEYIFFDSIDNKLKAKSKNIPGLASISEDIKTLLLDASVSPDTKFILNNLKLNIESSIGDYIYYEKLEPVKNIIHNSIDDLIDEFNLLENVSDELYELKKLNNLDEKYLISFEDISKNNSTYSVRFINKSNGESVYVETEKEIFSKYSEHITKEISTIKDSIITDVNGNLLDNIQLDHTSQVNTLNAAFFIQSLIDYSSNKDVLNDLSTSVKVQLYAQLFSTGLNTIYDSIQLVNLISNAVNDTINVLPTITEGIPIVSTILDGINLGAAIKELLDEHDPLLKKELEAKVGVLAINMSLSIAATVASIVGIGAEVTIFLLPIAGISAGIPSLVNNELILHDKATSVVNYFNHLSESKKYGPLKTEDDKILVPIDDLVISEIDFNNNSIKLGTCNILAMEGGSGHTVTGNIDHFFSSPYISSHIPSLSVYSAIGIKTENLDFSKKIMMLPNAPSRVFWWETGAVPGLRSLENDGTKLLDSIRDLYPGKFYWRFYAFFDYAITTLKPVYEDTNIKIKLDKDTRNFIMPTITTDEIRNKLSYSFDGAGGTYSLLLSSYPISMNINLSKDDLWIFNIDNEVREISIENGTIKKGNLIEDVLSKIDINKNKLIIGNQTIDFSGDIDNKDRYIFLTCELDDKISLIIEINLVAKSYSLLLSGDKNYLISNLSNTIEKINTLGLDSKNIAYNYTDESNNKYFGAISKTSQKSIIHYKKDSKNILEFYNGSTLEFNSKDFIAEDINVFMKDDINTITGKYYVDNNTDKSIDFSISLVSKNQVKVNGLYLNESVYSSYLDFVKNSDGHHNTSNFMNLFLNNISFWKLFGFENINFVIDKYFTLVGKTNLGYVEFICDNNKNIDIYFGEWKTSSSKSTIFSGNGRNVVVEPIYNPDTGEDISTSLDFSYEPLYGIDRYINKVLIAPDLYTSLININTNYYSNEYYPEIIVLNPNTFHKKVNINLDSSSFEYKWSTEGSDFILVRYLEESNKKILQKIRIKGILSNTQSFNKMSIDFKDIKKLSLGYIMSNFKSFNSENELDRDHLGFKIIDNKTYYYDEDSKLVKGLININNSLLYFDPIESNLVTGWQTINGKKYYFDINTGAASTSYKIINGKHFYFNNDGVMQLGVFKGPDGFEYFAPANTQNNNIEGQAIVYQSKFLTLNGKKYYFDNDSKAVTGWRIINNEKYYFNPNNAIAAVGLQVIDNNKYYFNPDTAIISKGWQTVNGSRYYFDTDTAIAFNGYKTIDGKHFYFDSDCVVKIGVFSGSNGFEYFAPANTYNNNIEGQAIVYQSKFLTLNGKKYYFDNNSKAVTGWQTIDSKKYYFNTNTAEAATGWQTIDGKKYYFNLNTAEAATGWQTIDGKKYYFNTNTSIASTGYTIINGKYFYFNTDGIMQIGVFKGPNGFEYFAPANTHNNNIEGQAILYQNKFLTLNGKKYYFGSDSKAITGWQTIDGKKYYFNPNNAIAATHLYTINNDKYYFSYDGILQNGYITIERNNFYFDANNESKMVTGVFKGPNGFEYFAPANTHNNNIEGQAIVYQNKFLTLNGKKYYFDNDSKAVTGWQTIDSKKYYFNLNTAVAVTGWQTIDGEKYYFNLNTAEAATGWQTIDGKRYYFNTNTYIASTGYTIINGKHFYFNTDGIMQIGVFKGPDGFEYFAPANTDANNIEGQAILYQNKFLTLNGKKYYFGSDSKAVTGLRTIDGKKYYFNTNTAVAVTGWQTINGKKYYFNTNTSIASTGYTIISGKHFYFNTDGIMQIGVFKGPDGFEYFAPANTDANNIEGQAIRYQNRFLYLHDNIYYFGNDSKAATGWATIDGNRYYFEPNTAMGANGYKTIDNKNFYFRNGLPQIGVFKGPNGFEYFAPANTDANNIDGQAIRYQNRFLHLLGKIYYFGNNSKAVTGWQTINSKVYYFMPDTAMAAAGGLFEIDGVIYFFGVDGVKAPGIYG

SEQ ID NO: 781 - protein, 2710 aa, Clostridium difficile
MSLISKEELIKLAYSIRPRENEYKTILTNLDEYNKLTTNNNENKYLQLKKLNESIDVFMNKYKNSSRNRALSNLKKDILKEVILIKNSNTSPVEKNLHFVWIGGEVSDIALEYIKQWADINAEYNVKLWYDSEAFLVNTLKKAIVESSTTEALQLLEEEIQNPQFDNTKFYKKRMEFIYDRQKRFINYYKSQINKPTVPTIDDIIKSHLVSEYNRDETLLESYRTNSLRKINSNHGIDIRANSLFTEQELLNIYSQELLNRGNLAAASDIVRLLALKNFGGVYLDVDMLPGIHSDLFKTIPRPSSIGLDRWEMIKLEAIMKYKKYINNYTSENFDKLDQQLKDNFKLIIESKSEKSEIFSKLENLNVSDLEIKIAFALGSVINQALISKQGSYLTNLVIEQVKNRYQFLNQHLNPAIESDNNFTDTTKIFHDSLFNSATAENSMFLTKIAPYLQVGFMPEARSTISLSGPGAYASAYYDFINLQENTIEKTLKASDLIEFKFPENNLSQLTEQEINSLWSFDQASAKYQFEKYVRDYTGGSLSEDNGVDFNKNTALDKNYLLNNKIPSNNVEEAGSKNYVHYIIQLQGDDISYEATCNLFSKNPKNSIIIQRNMNESAKSYFLSDDGESILELNKYRIPERLKNKEKVKVTFIGHGKDEFNTSEFARLSVDSLSNEISSFLDTIKLDISPKNVEVNLLGCNMFSYDFNVEETYPGKLLLSIMDKITSTLPDVNKDSITIGANQYEVRINSEGRKELLAHSGKWINKEEAIMSDLSSKEYIFFDSIDNKLKAKSKNIPGLASISEDIKTLLLDASVSPDTKFILNNLKLNIESSIGDYIYYEKLEPVKNIIHNSIDDLIDEFNLLENVSDELYELKKLNNLDEKYLISFEDISKNNSTYSVRFINKSNGESVYVETEKEIFSKYSEHITKEISTIKNSIITDVNGNLLDNIQLDHTSQVNTLNAAFFIQSLIDYSSNKDVLNDLSTSVKVQLYAQLFSTGLNTIYDSIQLVNLISNAVNDTINVLPTITEGIPIVSTILDGINLGAAIKELLDEHDPLLKKELEAKVGVLAINMSLSIAATVASIVGIGAEVTIFLLPIAGISAGIPSLVNNELILHDKATSVVNYFNHLSESKKYGPLKTEDDKILVPIDDLVISEIDFNNNSIKLGTCNILAMEGGSGHTVTGNIDHFFSSPYISSHIPSLSVYSAIGIKTENLDFSKKIMMLPNAPSRVFWWETGAVPGLRSLENDGTKLLDSIRDLYPGKFYWRFYAFFDYAITTLKPVYEDTNTKIKLDKDTRNFIMPTITTDEIRNKLSYSFDGAGGTYSLLLSSYPISMNINLSKDDLWIFNIDNEVREISIENGTIKKGNLIEDVLSKIDINKNKLIIGNQTIDFSGDIDNKDRYIFLTCELDDKISLIIEINLVAKSYSLLLSGDKNYLISNLSNTIEKINTLGLDSKNIAYNYTDESNNKYFGAISKTSQKSIIHYKKDSKNILEFYNGSTLEFNSKDFIAEDINVFMKDDINTITGKYYVDNNTDKSIDFSISLVSKNQVKVNGLYLNESVYSSYLDFVKNSDGHHNTSNFMNLFLNNISFWKLFGFENINFVIDKYFTLVGKTNLGYVEFICDNNKNIDIYFGEWKTSSSKSTIFSGNGRNVVVEPIYNPDTGEDISTSLDFSYEPLYGIDRYINKVLIAPDLYTSLININTNYYSNEYYPEIIVLNPNTFHKKVNINLDSSSFEYKWSTEGSDFILVRYLEESNKKILQKIRIKGILSNTQSFNKMSIYFKDIKKLSLGYIMSNFKSFNSENELDRDHLGFKIIDNKTYYYDEDSKLVKGLININNSLFYFDPIESNLVTGWQTINGKKYYFDINTGAASTSYKIINGKHFYFNNNGVMQLGVFKGPDGFEYFAPANTQNNNIEGQAIVYQSKFLTLNGKKYYFDNDSKAVTGWRIINNEKYYFNPNNAIAAVGLQVIDNNKYYFNPDTAIISKGWQTVNGSRYYFDTDTAIAFNGYKTIDGKHFYFDSDCVVKIGVFSGSNGFEYFAPANTYNNNIEGQAIVYQSKFLTLNGKKYYFDNNSKAVTGWQTIDSKKYYFNTNTAEAATGWQTIDGKKYYFNTNTAEAATGWQTIDGKKYYFNTNTSIASTGYTIINGKHFYFNTDGIMQIGVFKGPNGFEYFAPANTHNNNIEGQAILYQNKFLTLNGKKYYFGSDSKAITGWQTIDGKKYYFNPNNAIAATHLCTINNDKYYFSYDGILQNGYITIERNNFYFDANNESKMVTGVFKGPNGFEYFAPANTHNNNIEGQAIVYQNKFLTLNGKKYYFDNDSKAVTGWQTIDSKKYYFNLNTAVAVTGWQTIDGEKYYFNLNTAEAATGWQTIDGKRYYFNTNTYIASTGYTIINGKHFYFNTDGIMQIGVFKGPDGFEYFAPANTHNNNIEGQAILYQNKFLTLNGKKYYFGSDSKAVTGLRTIDGKKYYFNTNTAVAVTGWQTINGKKYYFNTNTYIASTGYTIISGKHFYFNTDGIMQIGVFKGPDGFEYFAPANTDANNIEGQAIRYQNRFLYLHDNIYYFGNDSKAATGWATIDGNRYYFEPNTAMGANGYKTIDNKNFYFRNGLPQIGVFKGPNGFEYFAPANTDANNIDGQAIRYQNRFLHLLGNIYYFGNNSKAVTGWQTINGKVYYFMPDTAMAAAGGLFEIDGVIYFFGVDGVKAPGIYG

SEQ ID NO: 782 - protein, 2710 aa, Clostridium difficile
MSLISKEELIKLAYSIRPRENEYKTILTNLDEYNKLTTNNNENKYLQLKKLNESIDVFMNKYKTSSRNRALSNLKKDILKEVILIKNSNTSPVEKNLHFVWIGGEVSDIALEYIKQWADINAEYNIKLWYDSEAFLVNTLKKAIVESSTTEALQLLEEEIQNPQFDNMKFYKKRMEFIYDRQKRFINYYKSQINKPTVPTIDDIIKSHLVSEYNRDETLLESYRTNSLRKINSNHGIDIRANSLFTEQELLNIYSQELLNRGNLAAASDIVRLLALKNFGGVYLDVDMLPGIHSDLFKTISRPSSIGLDRWEMIKLEAIMKYKKYINNYTSENFDKLDQQLKDNFKLIIESKSEKSEIFSKLENLNVSDLEIKIAFALGSVINQALISKQGSYLTNLVIEQVKNRYQFLNQHLNPAIESDNNFTDTTKIFHDSLFNSATAENSMFLTKIAPYLQVGFMPEARSTISLSGPGAYASAYYDFINLQENTIEKTLKASDLIEFKFPENNLSQLTEQEINSLWSFDQASAKYQFEKYVRDYTGGSLSEDNGVDFNKNTALDKNYLLNNKIPSNNVEEAGSKNYVHYIIQLQGDDISYEATCNLFSKNPKNSIIIQRNMNESAKSYFLSDDGESILELNKYRIPERLKNKEKVKVTFIGHGKDEFNTSEFARLSVDSLSNEISSFLDTIKLDISPKNVEVNLLGCNMFSYDFNVEETYPGKLLLSIMDKITSTLPDVNKNSITIGANQYEVRINSEGRKELLAHSGKWINKEEAIMSDLSSKEYIFFDSIDNKLKAKSKNIPGLASISEDIKTLLLDASVSPDTKFILNNLKLNIESSIGDYIYYEKLEPVKNIIHNSIDDLIDEFNLLENVSDELYELKKLNNLDEKYLISFEDISKNNSTYSVRFINKSNGESVYVETEKEIFSKYSEHITKEISTIKNSIITDVNGNLLDNIQLDHTSQVNTLNAAFFIQSLIDYSSNKDVLNDLSTSVKVQLYAQLFSTGLNTIYDSIQLVNLISNAVNDTINVLPTITEGIPIVSTILDGINLGAAIKELLDEHDPLLKKELEAKVGVLAINMSLSIAATVASIVGIGAEVTIFLLPIAGISAGIPSLVNNELILHDKATSVVNYFNHLSESKKYGPLKTEDDKILVPIDDLVISEIDFNNNSIKLGTCNILAMEGGSGHTVTGNIDHFFSSPSISSHIPSLSIYSAIGIETENLDFSKKIMMLPNAPSRVFWWETGAVPGLRSLENDGTRLLDSIRDLYPGKFYWRFYAFFDYAITTLKPVYEDTNIKIKLDKDTRNFIMPTITTNEIRNKLSYSFDGAGGTYSLLLSSYPISTNINLSKDDLWIFNIDNEVREISIENGTIKKGKLIKDVLSKIDINKNKLIIGNQTIDFSGDIDNKDRYIFLTCELDDKISLIIEINLVAKSYSLLLSGDKNYLISNLSNTIEKINTLGLDSKNIAYNYTDESNNKYFGAISKTSQKSIIHYKKDSKNILEFYNDSTLEFNSKDFIAEDINVFMKDDINTITGKYYVDNNTDKGIDFSISLVSKNQVKVNGLYLNESVYSSYLDFVKNSDGHHNTSNFMNLFLDNISFWKLFGFENINFVIDKYFTLVGKTNLGYVEFICDNNKNIDIYFGEWKTSSSKSTIFSGNGRNVVVEPIYNPDTGEDISTSLDFSYEPLYGIDRYINKVLIAPDLYTSLININTNYYSNEYYPEIIVLNPNTFHKKVNINLDSSSFEYKWSTEGSDFILVRYLEESNKKILQKIRIKGILSNTQSFNKMSIDFKDIKKLSLGYIMSNFKSFNSENELDRDHLGFKIIDNKTYYYDEDSKLVKGLININNSLFYFDPIEFNLVTGWQTINGKKYYFDINTGAASTSYKIINGKHFYFNNDGVMQLGVFKGPDGFEYFAPANTQNNNIEGQAIVYQSKFLTLNGKKYYFDNDSKAVTGWRIINNEKYYFNPNNAIAAVGLQVIDNNKYYFNPDTAIISKGWQTVNGSRYYFDTDTAIAFNGYKTIDGKHFYFDSDCVVKIGVFSTSNGFEYFAPANTYNNNIEGQAIVYQSKFLTLNGKKYYFDDNSKAVTGWQTIDSKKYYFNTNTAEAATGWQTIDGKKYYFNTNTAEAATGWQTIDGKKYYFNTNTAIASTGYTIINGKHFYFNTDGIMQIGVFKGPNGFEYFAPANTDANNIEGQAILYQNEFLTLNGKKYYFGSDSKAVTGWRIINNKKYYFNPNNAIAAIHLCTINNDKYYFSYDGILQNGYITIERNNFYFDANNESKMVTGVFKGPNGFEYFAPANTHNNNIEGQAIVYQNKFLTLNGKKYYFDNDSKAVTGWQTIDGKKYYFNLNTAEAATGWQTIDGKKYYFNLNTAEAATGWQTIDGKKYYFNTNTFIASTGYTSINGKHFYFNTDGIMQIGVFKGPNGFEYFAPANTHNNNIEGQAILYQNKFLTLNGKKYYFGSDSKAVTGLRTIDGKKYYFNTNTAVAVTGWQTINGKKYYFNTNTSIASTGYTIISGKHFYFNTDGIMQIGVFKGPDGFEYFAPANTDANNIEGQAIRYQNRFLYLHDNIYYFGNNSKAATGWVTIDGNRYYFEPNTAMGANGYKTIDNKNFYFRNGLPQIGVFKGSNGFEYFAPANTDANNIEGQAIRYQNRFLHLLGKIYYFGNNSKAVTGWQTINGKVYYFMPDTAMAAAGGLFEIDGVIYFFGVDGVKAPGIYG

SEQ ID NO: 783 - protein, 2710 aa, Clostridium difficile
MSLISKEELIKLAYSIRPRENEYKTILTNLDEYNKLTTNNNENKYLQLKKLNESIDVFMNKYKNSSRNRALSNLKKDILKEVILIKNSNTSPVEKNLHFVWIGGEVSDIALEYIKQWADINAEYNIKLWYDSEAFLVNTLKKAIVESSTTEALQLLEEEIQNPQFDNMKFYKKRMEFIYDRQKRFINYYKSQINKPTVPTIDDIIKSHLVSEYNRDETLLESYRTNSLRKINSNHGIDIRANSLFTEQELLNIYSQELLNRGNLAAASDIVRLLALKNFGGVYLDVDMLPGIHSDLFKTIPRPSSIGLDRWEMIKLEAIMKYKKYINNYTSENFDKLDQQLKDNFKLIIESKSEKSEIFSKLENLNVSDLEIKIAFALGSVINQALISKQGSYLTNLVIEQVKNRYQFLNQHLNPAIESDNNFTDTTKIFHDSLFNSATAENSMFLTKIAPYLQVGFMPEARSTISLSGPGAYASAYYDFINLQENTIEKTLKASDLIEFKFPENNLSQLTEQEINSLWSFDQASAKYQFEKYVRDYTGGSLSEDNGVDFNKNTALDKNYLLNNKIPSNNVEEAGSKNYVHYIIQLQGDDISYEATCNLFSKNPKNSIIIQRNMNESAKSYFLSDDGESILELNKYRIPERLKNKEKVKVTFIGHGKDEFNTSEFARLSVDSLSNEISSFLDTIKLDISPKNVEVNLLGCNMFSYDFNVEETYPGKLLLSIMDKITSTLPDVNKDSITIGANQYEVRINSEGRKELLAHSGKWINKEEAIMSDLSSKEYIFFDSIDNKLKAKSKNIPGLASISEDIKTLLLDASVSPDTKFILNNLKLNIESSIGDYIYYEKLEPVKNIIHNSIDDLIDEFNLLENVSDELYELKKLNNLDEKYLISFEDISKNNSTYSVRFINKSNGESVYVETEKEIFSKYSEHITKEISTIKNSIITDVNGNLLDNIQLDHTSQVNTLNAAFFIQSLIDYSSNKDVLNDLSTSVKVQLYVQLFSTGLNTIYDSIQLVNLISNAVNDTINVLPTITEGIPIVSTILDGINLGAAIKELLDEHDPLLKKELEAKVGVLAINMSLSIAATVASIVGIGAEVTIFLLPIAGISAGIPSLVNNELILHDKATSVVNYFNHLSESKEYGPLKTEDDKILVPIDDLVISEIDFNNNSIKLGTCNILAMEGGSGHTVTGNIDHFFSSPYISSHIPSLSVYSAIGIKTENLDFSKKIMMLPNAPSRVFWWETGAVPGLRSLENNGTKLLDSIRDLYPGKFYWRFYAFFDYAITTLKPVYEDTNTKIKLDKDTRNFIMPTITTDEIRNKLSYSFDGAGGTYSLLLSSYPISMNINLSKDDLWIFNIDNEVREISIENGTIKKGNLIEDVLSKIDINKNKLIIGNQTIDFSGDIDNKDRYIFLTCELDDKISLIIEINLVAKSYSLLLSGDKNYLISNLSNTIEKINTLGLDSKNIAYNYTDESNNKYFGAISKTSQKSIIHYKKDSKNILEFYNGSTLEFNSKDFIAEDINVFMKDDINTITGKYYVDNNTDKSIDFSISLVSKNQVKVNGLYLNESVYSSYLDFVKNSDGHHNTSNFMNLFLNNISFWKLFGFENINFVIDKYFTLVGKTNLGYVEFICDNNKNIDIYFGEWKTSSSKSTIFSGNGRNVVVEPIYNPDTGEDISTSLDFSYEPLYGIDRYINKVLIAPDLYTSLININTNYYSNEYYPEIIVLNPNTFHKKVNINLDSSSFEYKWSTEGSDFILVRYLEESNKKILQKIRIKGILSNTQSFNKMSIDFKDIKKLSLGYIMSNFKSFNSENELDRDHLGFKIIDNKTYYYDEDSKLVKGLININNSLFYFDPIESNLVTGWQTINGKKYYFDINTGAASTSYKIINGKHFYFNNNGVMQLGVFKGPDGFEYFAPANTQNNNIEGQAIVYQSKFLTLNGKKYYFDNDSKAVTGWRIINNEKYYFNPNNAIAAVGLQVIDNNKYYFNPDTAIISKGWQTVNGSRYYFDTDTAIAFNGYKTIDGKHFYFDSDCVVKIGVFSGSNGFEYFAPANTYNNNIEGQAIVYQSKFLTLNGKKYYFDNNSKAVTGWQTIDSKKYYFNTNTAEAATGWQTIDGKKYYFNTNTAEAATGWQTIDGKKYYFNTNTSIASTGYTIINGKYFYFNTDGIMQIGVFKVPNGFEYFAPANTHNNNIEGQAILYQNKFLTLNGKKYYFGSDSKAITGWQTIDGKKYYFNPNNAIAATHLCTINNDKYYFSYDGILQNGYITIERNNFYFDANNESKMVTGVFKGPNGFEYFAPANTHNNNIEGQAIVYQNKFLTLNGKKYYFDNDSKAVTGWQTIDSKKYYFNLNTAVAVTGWQTIDGEKYYFNLNTAEAATGWQTIDGKRYYFNTNTYIASTGYTIINGKHFYFNTDGIMQIGVFKGPDGFEYFAPANTHNNNIEGQAILYQNKFLTLNGKKYYFGSDSKAVTGLRTIDGKKYYFNTNTAVAVTGWQTINGKKYYFNTNTYIASTGYTIISGKHFYFNTDGIMQIGVFKGPDGFEYFAPANTDANNIEGQAIRYQNRFLYLHDNIYYFGNDSKAATGWATIDGNRYYFEPNTAMGANGYKTIDNKNFYFRNGLPQIGVFKGPNGFEYFAPANTDANNIDGQAIRYQNRFLHLLGKIYYFGNNSKAVTGWQTINSKVYYFMPDTAMAAAGGLFEIDGVIYFFGVDGVKAPGIYG

SEQ ID NO: 784 - protein, 2710 aa, Clostridium difficile
MSLISKEELIKLAYSIRPRENEYKTILTNLDEYNKLTTNNNENKYLQLKKLNESIDVFMNKYKTSSRNRALSNLKKDILKEVILIKNSNTSPVEKNLHFVWIGGEVSDIALEYIKQWADINAEYNIKLWYDSEAFLVNTLKKAIVESSTTEALQLLEEEIQNPQFDNMKFYKKRMEFIYDRQKRFINYYKSQINKPTVPTIDDIIKSHLVSEYNRDETVLESYRTNSLRKINSNHGIDIRANSLFTEQELLNIYSQELLNRGNLAAASDIVRLLALKNFGGVYLDVDMLPGIHSDLFKTISRPSSIGLDRWEMIKLEAIMKYKKYINNYTSENFDKLDQQLKDNFKLIIESKSEKSEIFSKLENLNVSDLEIKIAFALGSVINQALISKQGSYLTNLVIEQVKNRYQFLNQHLNPAIESDNNFTDTTKIFHDSLFNSATAENSMFLTKIAPYLQVGFMPEARSTISLSGPGAYASAYYDFINLQENTIEKTLKASDLIEFKFPENNLSQLTEQEINSLWSFDQASAKYQFEKYVRDYTGGSLSEDNGVDFNKNTALDKNYLLNNKIPSNNVEEAGSKNYVHYIIQLQGDDISYEATCNLFSKNPKNSIIIQRNMNESAKSYFLSDDGESILELNKYRIPERLKNKEKVKVTFIGHGKDEFNTSEFARLSVDSLSNEISSFLDTIKLDISPKNVEVNLLGCNMFSYDFNVEETYPGKLLLSIMDKITSTLPDVNKNSITIGANQYEVRINSEGRKELLAHSGKWINKEEAIMSDLSSKEYIFFDSIDNKLKAKSKNIPGLASISEDIKTLLLDASVSPDTKFILNNLKLNIESSIGDYIYYEKLEPVKNIIHNSIDDLIDEFNLLENVSDELYELKKLNNLDEKYLISFEDISKNNSTYSVRFINKSNGESVYVETEKEIFSKYSEHITKEISTIKNSIITDVNGNLLDNIQLDHTSQVNTLNAAFFIQSLIDYSSNKDVLNDLSTSVKVQLYAQLFSTGLNTIYDSIQLVNLISNAVNDTINVLPTITEGIPIVSTILDGINLGAAIKELLDEHDPLLKKELEAKVGVLAINMSLSIAATVASIVGIGAEVTIFLLPIAGISAGIPSLVNNELILHDKATSVVNYFNHLSESKKYGPLKTEDDKILVPIDDLVISEIDFNNNSIKLGTCNILAMEGGSGHTVTGNIDHFFSSPSISSHIPSLSIYSAIGIETENLDFSKKIMMLPNAPSRVFWWETGAVPGLRSLENDGTRLLDSIRDLYPGKFYWRFYAFFDYAITTLKPVYEDTNIKIKLDKDTRNFIMPTITTNEIRNKLSYSFDGAGGTYSLLLSSYPISTNINLSKDDLWIFNIDNEVREISIENGTIKKGKLIKDVLSKIDINKNKLIIGNQTIDFSGDIDNKDRYIFLTCELDDKISLIIEINLVAKSYSLLLSGDKNYLISNLSNTIEKINTLGLDSKNIAYNYTDESNNKYFGAISKTSQKSIIHYKKDSKNILEFYNDSTLEFNSKDFIAEDINVFMKDDINTITGKYYVDNNTDKSIDFSISLVSKNQVKVNGLYLNESVYSSYLDFVKNSDGHHNTSNFMNLFLDNISFWKLFGFENINFVIDKYFTLVGKTNLGYVEFICDNNKNIDIYFGEWKTSSSKSTIFSGNGRNVVVEPIYNPDTGEDISTSLDFSYEPLYGIDRYINKVLIAPDLYTSLININTNYYSNEYYPEIIVLNPNTFHKKVNINLDSSSFEYKWSTEGSDFILVRYLEESNKKILQKIRIKGILSNTQSFNKMSIDFKDIKKLSLGYIMSNFKSFNSENELDRDHLGFKIIDNKTYYYDEDSKLVKGLININNSLFYFDPIEFNLVTGWQTINGKKYYFDINTGAALTSYKIINGKHFYFNNDGVMQLGVFKGPDGFEYFAPANTQNNNIEGQAIVYQSKFLTLNGKKYYFDNDSKAVTGWRIINNEKYYFNPNNAIAAVGLQVIDNNKYYFNPDTAIISKGWQTVNGSRYYFDTDTAIAFNGYKTIDGKHFYFDSDCVVKIGVFSGSNGFEYFAPANTYNNNIEGQAIVYQSKFLTLNGKKYYFDNNSKAVTGWQTIDSKKYYFNTNTAEAATGWQTIDGKKYYFNTNTAEAATGWQTIDGKKYYFNTNTAIASTGYTSINGKHFYFNTDGIMQIGVFKGPNGFEYFAPANTDANNIEGQAILYQNEFLTLNGKKYYFGSDSKAVTGWRIINNKKYYFNPNNAIAAIHLCTINNDKYYFSYDGILQNGYITIERNNFYFDANNESKMVTGVFKGPNGFEYFAPANTHNNNIEGQAIVYQNKFLTLNGKKYYFDNDSKAVTGWQTIDGKKYYFNLNTAEAATGWQTIDGKKYYFNLNTAEAATGWQTIDGKKYYFNTNTFIASTGYTSINGKHFYFNTDGIMQIGVFKGPNGFEYFAPANTHNNNIEGQAILYQNKFLTLNGKKYYFGSDSKAVTGLRTIDGKKYYFNTNTAVAVTGWQTINGKKYYFNTNTSIASTGYTIISGKHFYFNTDGIMQIGVFKGPDGFEYFAPANTDANNIEGQAIRYQNRFLYLHDNIYYFGNNSKAATGWVTIDGNRYYFEPNTAMGANGYKTIDNKNFYFRNGLPQIGVFKGSNGFEYFAPANTDANNIEGQAIRYQNRFLHLLGKIYYFGNNSKAVTGWQTINGKVYYFMPDTAMAAAGGLFEIDGVIYFFGVDGVKAPGIYG

SEQ ID NO: 785 - protein, 2710 aa, Clostridium difficile
MSLISKEELIKLAYSIRPRENEYKTILTNLDEYNKLTTNNNENKYLQLKKLNESIDVFMNKYKTSSRNRALSNLKKDILKEVILIKNSNTSPVEKNLHFVWIGGEVSDIALEYIKQWADINAEYNIKLWYDSEAFLVNTLKKAIVESSTTEALQLLEEEIQNPQFDNMKFYKKRMEFIYDRQKRFINYYKSQINKPTVPTIDDIIKSHLVSEYNRDETVLESYRTNSLRKINSNHGIDIRANSLFTEQELLNIYSQELLNRGNLAAASDIVRLLALKNFGGVYLDVDMLPGIHSDLFKTISRPSSIGLDRWEMIKLEAIMKYKKYINNYTSENFDKLDQQLKDNFKLIIESKSEKSEIFSKLENLNVSDLEIKIAFALGSVINQALISKQGSYLTNLVIEQVKNRYQFLNQHLNPAIESDNNFTDTTKIFHDSLFNSATAENSMFLTKIAPYLQVGFMPEARSTISLSGPGAYASAYYDFINLQENTIEKTLKASDLIEFKFPENNLSQLTEQEINSLWSFDQASAKYQFEKYVRDYTGGSLSEDNGVDFNKNTALDKNYLLNNKIPSNNVEEAGSKNYVHYIIQLQGDDISYEATCNLFSKNPKNSIIIQRNMNESAKSYFLSDDGESILELNKYRIPERLKNKEKVKVTFIGHGKDEFNTSEFARLSVDSLSNEISSFLDTIKLDISPKNVEVNLLGCNMFSYDFNVEETYPGKLLLSIMDKITSTLPDVNKNSITIGANQYEVRINSEGRKELLAHSGKWINKEEAIMSDLSSKEYIFFDSIDNRLKAKSKNIPGLASISEDIKTLLLDASVSPDTKFILNNLKLNIESSIGDYIYYEKLEPVKNIIHNSIDDLIDEFNLLENVSDELYELKKLNNLDEKYLISFEDISKNNSTYSVRFINKSNGESVYVETEKEIFSKYSEHITKEISTIKNSIITDVNGNLLDNIQLDHTSQVNTLNAAFFIQSLIDYSSNKDVLNDLSTSVKVQLYAQLFSTGLNTIYDSIQLVNLISNAVNDTINVLPTITEGIPIVSTILDGINLGAAIKELLDEHDPLLKKELEAKVGVLAINMSLSIAATVASIVGIGAEVTIFLLPIAGISAGIPSLVNNELILHDKATSVVNYFNHLSESKKYGPLKTEDDKILVPIDDLVISEIDFNNNSIKLGTCNILAMEGGSGHTVTGNIDHFFSSPSISSHIPSLSIYSAIGIETENLDFSKKIMMLPNAPSRVFWWETGAVPGLRSLENDGTRLLDSIRDLYPGKFYWRFYAFFDYAITTLKPVYEDTNIKIKLDKDTRNFIMPTITTNEIRNKLSYSFDGAGGTYSLLLSSYPISTNINLSKDDLWIFNIDNEVREISIENGTIKKGKLIKDVLSKIDINKNKLIIGNQTIDFSGDIDNKDRYIFLTCELDDKISLIIEINLVAKSYSLLLSGDKNYLISNLSNTIEKINTLGLDSKNIAYNYTDESNNKYFGAISKTSQKSIIHYKKDSKNILEFYNDSTLEFNSKDFIAEDINVFMKDDINTITGKYYVDNNTDKSIDFSISLVSKNQVKVNGLYLNESVYSSYLDFVKNSDGHHNTSNFMNLFLDNISFWKLFGFENINFVIDKYFTLVGKTNLGYVEFICDNNKNIDIYFGEWKTSSSKSTIFSGNGRNVVVEPIYNPDTGEDISTSLDFSYEPLYGIDRYINKVLIAPDLYTSLININTNYYSNEYYPEIIVLNPNTFHKKVNINLDSSSFEYKWSTEGSDFILVRYLEESNKKILQKIRIKGILSNTQSFNKMSIDFKDIKKLSLGYIMSNFKSFNSENELDRDHLGFKIIDNKTYYYDEDSKLVKGLININNSLFYFDPIEFNLVTGWQTINGKKYYFDINTGAALTSYKIINGKHFYFNNDGVMQLGVFKGPDGFEYFAPANTQNNNIEGQAIVYQSKFLTLNGKKYYFDNNSKAVTGWRIINNEKYYFNPNNAIAAVGLQVIDNNKYYFNPDTAIISKGWQTVNGSRYYFDTDTAIAFNGYKTIDGKHFYFDSDCVVKIGVFSTSNGFEYFAPANTYNNNIEGQAIVYQSKFLTLNGKKYYFDNNSKAVTGWQTIDSKKYYFNTNTAEAATGWQTIDGKKYYFNTNTAEAATGWQTIDGKKYYFNTNTAIASTGYTIINGKHFYFNTDGIMQIGVFKGPNGFEYFAPANTDANNIEGQAILYQNEFLTLNGKKYYFGSDSKAVTGWRIINNKKYYFNPNNAIAAIHLCTINNDKYYFSYDGILQNGYITIERNNFYFDANNESKMVTGVFKGPNGFEYFAPANTHNNNIEGQAIVYQNKFLTLNGKKYYFDNDSKAVTGWQTIDGKKYYFNLNTAEAATGWQTIDGKKYYFNLNTAEAATGWQTIDGKKYYFNTNTFIASTGYTSINGKHFYFNTDGIMQIGVFKGPNGFEYFAPANTDANNIEGQAILYQNKFLTLNGKKYYFGSDSKAVTGLRTIDGKKYYFNTNTAVAVTGWQTINGKKYYFNTNTSIASTGYTIISGKHFYFNTDGIMQIGVFKGPDGFEYFAPANTDANNIEGQAIRYQNRFLYLHDNIYYFGNNSKAATGWVTIDGNRYYFEPNTAMGANGYKTIDNKNFYFRNGLPQIGVFKGSNGFEYFAPANTDANNIEGQAIRYQNRFLHLLGKIYYFGNNSKAVTGWQTINGKVYYFMPDTAMAAAGGLFEIDGVIYFFGVDGVKAPGIYG

SEQ ID NO: 786 - protein, 2710 aa, Clostridium difficile
MSLISKEELIKLAYSIRPRENEYKTILTNLDEYNKLTTNNNENKYLQLKKLNESIDVFMNKYKNSSRNRALSNLKKDILKEVILIKNSNTSPVEKNLHFVWIGGEVSDIALEYIKQWADINAEYNIKLWYDSEAFLVNTLKKAIVESSTTEALQLLEEEIQNPQFDNMKFYKKRMEFIYDRQKRFINYYKSQINKPTVPTIDDIIKSHLVSEYNRDETLLESYRTNSLRKINSNHGIDIRANSLFTEQELLNIYSQELLNRGNLAAASDIVRLLALKNFGGVYLDVDMLPGIHSDLFKTIPRPSSIGLDRWEMIKLEAIMKYKKYINNYTSENFDKLDQQLKDNFKLIIESKSEKSEIFSKLENLNVSDLEIKIAFALGSVINQALISKQGSYLTNLVIEQVKNRYQFLNQHLNPAIESDNNFTDTTKIFHDSLFNSATAENSMFLTKIAPYLQVGFMPEARSTISLSGPGAYASAYYDFINLQENTIEKTLKASDLIEFKFPENNLSQLTEQEINSLWSFDQASAKYQFEKYVRDYTGGSLSEDNGVDFNKNTALDKNYLLNNKIPSNNVEEAGSKNYVHYIIQLQGDDISYEATCNLFSKNPKNSIIIQRNMNESAKSYFLSDDGESILELNKYRIPERLKNKEKVKVTFIGHGKDEFNTSEFARLSVDSLSNEISSFLDTIKLDISPKNVEVNLLGCNMFSYDFNVEETYPGKLLLSIMDKITSTLPDVNKDSITIGANQYEVRINSEGRKELLAHSGKWINKEEAIMSDLSSKEYIFFDSIDNKLKAKSKNIPGLASISEDIKTLLLDASVSPDTKFILNNLKLNIESSIGDYIYYEKLEPVKNIIHNSIDDLIDEFNLLENVSDELYELKKLNNLDEKYLISFEDISKNNSTYSVRFINKSNGESVYVETEKEIFSKYSEHITKEISTIKNSIITDVNGNLLDNIQLDHTSQVNTLNAAFFIQSLIDYSSNKDVLNDLSTSVKVQLYAQLFSTGLNTIYDSIQLVNLISNAVNDTINVLPTITEGIPIVSTILDGINLGAAIKELLDEHDPLLKKELEAKVGVLAINMSLSIAATVASIVGIGAEVTIFLLPIAGISAGIPSLVNNELILHDKATSVVNYFNHLSESKKYGPLKTEDDKILVPIDDLVISEIDFNNNSIKLGTCNILAMEGGSGHTVTGNIDHFFSSPYISSHIPSLSVYSAIGIKTENLDFSKKIMMLPNAPSRVFWWETGAVPGLRSLENDGTKLLDSIRDLYPGKFYWRFYAFFDYAITTLKPVYEDTNTKIKLDKDTRNFIMPTITTDEIRNKLSYSFDGAGGTYSLLLSSYPISMNINLSKDDLWIFNIDNEVREISIENGTIKKGNLIEDVLSKIDINKNKLIIGNQTIDFSGDIDNKDRYIFLTCELDDKISLIIEINLVAKSYSLLLSGDKNYLISNLSNTIEKINTLGLDSKNIAYNYTDESNNKYFGAISKTSQKSIIHYKKDSKNILEFYNGSTLEFNSKDFIAEDINVFMKDDINTITGKYYVDNNTDKSIDFSISLVSKNQVKVNGLYLNESVYSSYLDFVKNSDGHHNTSNFMNLFLNNISFWKLFGFENINFVIDKYFTLVGKTNLGYVEFICDNNKNIDIYFGEWKTSSSKSTIFSGNGRNVVVEPIYNPDTGEDISTSLDFSYEPLYGIDRYINKVLIAPDLYTSLININTNYYSNEYYPEIIVLNPNTFHKKVNINLDSSSFEYKWSTEGSDFILVRYLEESNKKILQKIRIKGILSNTQSFNKMSIDFKDIKKLSLGYIMSNFKSFNSENELDRDHLGFKIIDNKTYYYDEDSKLVKGLININNSLFYFDPIESNLVTGWQTINGKKYYFDINTGAASTSYKIINGKHFYFNNNGVMQLGVFKGPDGFEYFAPANTQNNNIEGQAIVYQSKFLTLNGKKYYFDNDSKAVTGWRIINNEKYYFNPNNAIAAVGLQVIDNNKYYFNPDTAIISKGWQTVNGSRYYFDTDTAIAFNGYKTIDGKHFYFDSDCVVKIGVFSGSNGFEYFAPANTYNNNIEGQAIVYQSKFLTLNGKKYYFDNNSKAVTGWQTIDSKKYYFNTNTAEAATGWQTIDGKKYYFNTNTAEAATGWQTIDGKKYYFNTNTSIASTGYTIINGKHFYFNTDGIMQIGVFKGPNGFEYFAPANTHNNNIEGQAILYQNKFLTLNGKKYYFGSDSKAITGWQTIDGKKYYFNPNNAIAATHLCTINNDKYYFSYDGILQNGYITIERNNFYFDANNESKMVTGVFKGPNGFEYFAPANTHNNNIEGQAIVYQNKFLTLNGKKYYFDNDSKAVTGWQTIDSKKYYFNLNTAVAVTGWQTIDGEKYYFNLNTAEAATGWQTIDGKRYYFNTNTYIASTGYTIINGKHFYFNTDGIMQIGVFKGPDGFEYFAPANTHNNNIEGQAILYQNKFLTLNGKKYYFGSDSKAVTGLRTIDGKKYYFNTNTAVAVTGWQTINGKKYYFNTNTYIASTGYTIISGKHFYFNTDGIMQIGVFKGPDGFEYFAPANTDANNIEGQAIRYQNRFLYLHDNIYYFGNDSKAATGWATIDGNRYYFEPNTAMGANGYKTIDNKNFYFRNGLPQIGVFKGPNGFEYFAPANTDANNIDGQAIRYQNRFLHLLGKIYYFGNNSKAVTGWQTINSKVYYFMPDTAMAAAGGLFEIDGVIYFFGVDGVKAPGIYG

SEQ ID NO: 787 - protein, 2710 aa, Clostridium difficile
MSLISKEELIKLAYSIRPRENEYKTILTNLDEYNKLTTNNNENKYLQLKKLNESIDVFMNKYKNSSRNRALSNLKKDILKEVILIKNSNTSPVEKNLHFVWIGGEVSDIALEYIKQWADINAEYNIKLWYDSEAFLVNTLKKAIVESSTTEALQLLEEEIQNPQFDNMKFYKKRMEFIYDRQKRFINYYKSQINKPTVPTIDDIIKSHLVSEYNRDETLLESYRTNSLRKINSNHGIDIRANSLFTEQELLNIYSQELLNRGNLAAASDIVRLLALKNFGGVYLDVDMLPGIHSDLFKTIPRPSSIGLDRWEMIKLEAIMKYKKYINNYTSENFDKLDQQLKDNFKLIIESKSEKSEIFSKLENLNVSDLEIKIAFALGSVINQALISKQGSYLTNLVIEQVKNRYQFLNQHLNPAIESDNNFTDTTKIFHDSLFNSATAENSMFLTKIAPYLQVGFMPEARSTISLSGPGAYASAYYDFINLQENTIEKTLKASDLIEFKFPENNLSQLTEQEINSLWSFDQASAKYQFEKYVRDYTGGSLSEDNGVDFNKNTALDKNYLLNNKIPSNNVEEAGSKNYVHYIIQLQGDDISYEATCNLFSKNPKNSIIIQRNMNESAKSYFLSDDGESILELNKYRIPERLKNKEKVKVTFIGHGKDEFNTSEFARLSVDSLSNEISSFLDTIKLDISPKNVEVNLLGCNMFSYDFNVEETYPGKLLLSIMDKITSTLPDVNKDSITIGANQYEVRINSEGRKELLAHSGKWINKEEAIMSDLSSKEYIFFDSIDNKLKAKSKNIPGLASISEDIKTLLLDASVSPDTKFILNNLKLNIESSIGDYIYYEKLEPVKNIIHNSIDDLIDEFNLLENVSDELYELKKLNNLDEKYLISFEDISKNNSTYSVRFINKSNGESVYVETEKEIFSKYSEHITKEISTIKNSIITDVNGNLLDNIQLDHTSQVNTLNAAFFIQSLIDYSSNKDVLNDLSTSVKVQLYAQLFSTGLNTIYDSIQLVNLISNAVNDTINVLPTITEGIPIVSTILDGINLGAAIKELLDEHDPLLKKELEAKVGVLAINMSLSIAATVASIVGIGAEVTIFLLPIAGISAGIPSLVNNELILHDKATSVVNYFNHLSESKEYGPLKTEDDKILVPIDDLVISEIDFNNNSIKLGTCNILAMEGGSGHTVTGNIDHFFSSPYISSHIPSLSVYSAIGIKTENLDFSKKIMMLPNAPSRVFWWETGAVPGLRSLENNGTKLLDSIRDLYPGKFYWRFYAFFDYAITTLKPVYEDTNTKIKLDKDTRNFIMPTITTDEIRNKLSYSFDGAGGTYSLLLSSYPISMNINLSKDDLWIFNIDNEVREISIENGTIKKGNLIEDVLSKIDINKNKLIIGNQTIDFSGDIDNKDRYIFLTCELDDKISLIIEINLVAKSYSLLLSGDKNYLISNLSNTIEKINTLGLDSKNIAYNYTDESNNKYFGAISKTSQKSIIHYKKDSKNILEFYNGSTLEFNSKDFIAEDINVFMKDDINTITGKYYVDNNTDKSIDFSISLVSKNQVKVNGLYLNESVYSSYLDFVKNSDGHHNTSNFMNLFLNNISFWKLFGFENINFVIDKYFTLVGKTNLGYVEFICDNNKNIDIYFGEWKTSSSKSTIFSGNGRNVVVEPIYNPDTGEDISTSLDFSYEPLYGIDRYINKVLIAPDLYTSLININTNYYSNEYYPEIIVLNPNTFHKKVNINLDSSSFEYKWSTEGSDFILVRYLEESNKKILQKIRIKGILSNTQSFNKMSIDFKDIKKLSLGYIMSNFKSFNSENELDRDHLGFKIIDNKTYYYDEDSKLVKGLININNSLLYFDPIESNLVTGWQTINGKKYYFDINTGAASTSYKIINGKHFYFNNDGVMQLGVFKGPDGFEYFAPANTHNNNIEGQAIVYQSKFLTLNGKKYYFDNDSKAVTGWRIINNEKYYFNPNNAIAAVGLQVIDNNKYYFNPDTAIISKGWQTVNGSRYYFDTDTAIAFNGYKTIDGKHFYFDSDCVVKIGVFSGSNGFEYFAPANTYNNNIEGQAIVYQSKFLTLNGKKYYFDNNSKAVTGWQTIDSKKYYFNTNTAEAATGWQTIDGKKYYFNTNTAEAATGWQTIDGKKYYFNTNTSIASTGYTIINGKYFYFNTDGIMQIGVFKVPNGFEYFAPANTHNNNIEGQAILYQNKFLTLNGKKYYFGSDSKAITGWQTIDGKKYYFNPNNAIAATHLCTINNDKYYFSYDGILQNGYITIERNNFYFDANNESKMVTGVFKGPNGFEYFAPANTHNNNIEGQAIVYQNKFLTLNGKKYYFDNDSKAVTGWQTIDSKKYYFNLNTAVAVTGWQTIDGEKYYFNLNTAEAATGWQTIDGKRYYFNTNTYIASTGYTIINGKHFYFNTDGIMQIGVFKGPDGFEYFAPANTHNNNIEGQAILYQNKFLTLNGKKYYFGSDSKAVTGLRTIDGKKYYFNTNTAVAVTGWQTINGKKYYFNTNTYIASTGYTIISGKHFYFNTDGIMQIGVFKGPDGFEYFAPANTDANNIEGQAIRYQNRFLYLHDNIYYFGNDSKAATGWATIDGNRYYFEPNTAMGANGYKTIDNKNFYFRNGLPQIGVFKGPNGFEYFAPANTDANNIDGQAIRYQNRFLHLLGNIYYFGNNSKAVTGWQTINGKVYYFMPDTAMAAAGGLFEIDGAIYFFGVDGVKAPGIYG

SEQ ID NO: 788 - protein, 2710 aa, Clostridium difficile
MSLISKEELIKLAYSIRPRENEYKTILTNLDEYNKLTTNNNENKYLQLKKLNESIDVFMNKYKNSSRNRALSNLKKDILKEVILIKNSNTSPVEKNLHFVWIGGEVSDIALEYIKQWADINAEYNVKLWYDSEAFLVNTLKKAIVESSTTEALQLLEEEIQNPQFDNMKFYKKRMEFIYDRQKRFINYYKSQINKPTVPTIDDIIKSHLVSEYNRDETLLESYRTNSLRKINSNHGIDIRANSLFTEQELLNIYSQELLNRGNLAAASDIVRLLALKNFGGVYLDVDMLPGIHSDLFKTISRPSSIGLDRWEMIKLEAIMKYKKYINNYTSENFDKLDQQLKDNFKLIIESKSEKSEIFSKLENLNVSDLEIKIAFALGSVINQALISKQGSYLTNLVIEQVKNRYQFLNQHLNPAIESDNNFTDTTKIFHDSLFNSATAENSMFLTKIAPYLQVGFMPEARSTISLSGPGAYASAYYDFINLQENTIEKTLKASDLIEFKFPENNLSQLTEQEINSLWSFDQASAKYQFEKYVRDYTGGSLSEDNGVDFNKNTALDKNYLLNNKIPSNNVEEAGSKNYVHYIIQLQGDDISYEATCNLFSKNPKNSIIIQRNMNESAKSYFLSDDGESILELNKYRIPERLKNKEKVKVTFIGHGKDEFNTSEFARLSVDSLSNEISSFLDTIKLDISPKNVEVNLLGCNMFSYDFNVEETYPGKLLLSIMDKITSTLPDVNKDSITIGANQYEVRINSEGRKELLAHSGKWINKEEAIMSDLSSKEYIFFDSIDNKLKAKSKNIPGLASISEDIKTLLLDASVSPDTKFILNNLKLNIESSIGDYIYYEKLEPVKNIIHNSIDDLIDEFNLLENVSDELYELKKLNNLDEKYLISFEDISKNNSTYSVRFINKSNGESVYVETEKEIFSKYSEHITKEISTIKNSIITDVNGNLLDNIQLDHTSQVNTLNAAFFIQSLIDYSSNKDVLNDLSTSVKVQLYAQLFSTGLNTIYDSIQLVNLISNAVNDTINVLPTITEGIPIVSTILDGINLGAAIKELLDEHDPLLKKELEAKVGVLAINMSLSIAATVASIVGIGAEVTIFLLPIAGISAGIPSLVNNELILHDKATSVVNYFNHLSESKKYGPLKTEDDKILVPIDDLVISEIDFNNNSIKLGTCNILAMEGGSGHTVTGNIDHFFSSPYISSHIPSLSVYSAIGIKTENLDFSKKIMMLPNAPSRVFWWETGAVPGLRSLENDGTKLLDSIRDLYPGKFYWRFYAFFDYAITTLKPVYEDTNIKIKLDKDTRNFIMPTITTDEIRNKLSYSFDGAGGTYSLLLSSYPISMNINLSKDDLWIFNIDNEVREISIENGTIKKGNLIEDVLSKIDINKNKLIIGNQTIDFSGDIDNKDRYIFLTCELDDKISLIIEINLVAKSYSLLLSGDKNYLISNLSNTIEKINTLGLDSKNIAYNYTDESNNKYFGAISKTSQKSIIHYKKDSKNILEFYNGSTLEFNSKDFIAEDINVFMKDDINTITGKYYVDNNTDKSIDFSISLVSKNQVKVNGLYLNESVYSSYLDFVKNSDGHHNTSNFMNLFLNNISFWKLFGFENINFVIDKYFTLVGKTNLGYVEFICDNNKNIDIYFGEWKTSSSKSTIFSGNGRNVVVEPIYNPDTGEDISTSLDFSYEPLYGIDRYINKVLIAPDLYTSLININTNYYSNEYYPEIIVLNPNTFHKKVNINLDSSSFEYKWSTEGSDFILVRYLEESNKKILQKIRIKGILSNTQSFNKMSIDFKDIKKLSLGYIMSNFKSFNSENELDRDHLGFKIIDNKTYYYDEDSKLVKGLININNSLLYFDPIESNLVTGWQTINGKKYYFDINTGAASTSYKIINGKHFYFNNDGVMQLGVFKGPDGFEYFAPANTHNNNIEGQAIVYQSKFLTLNGKKYYFDNDSKAVTGWRIINNEKYYFNPNNAIAAVGLQVIDNNKYYFNPDTAIISKGWQTVNGSRYYFDTDTAIAFNGYKTIDGKHFYFDSDCVVKIGVFSGSNGFEYFAPANTYNNNIEGQAIVYQSKFLTLNGKKYYFDNNSKAVTGWQTIDSKKYYFNTNTAEAATGWQTIDGKKYYFNTNTAEAATGWQTIDGKKYYFNTNTSIASTGYTIINGKYFYFNTDGIMQIGVFKVPNGFEYFAPANTHNNNIEGQAILYQNKFLTLNGKKYYFGSDSKAITGWQTIDGKKYYFNPNNAIAATHLCTINNDKYYFSYDGILQNGYITIERNNFYFDANNESKMVTGVFKGPNGFEYFAPANTHNNNIEGQAIVYQNKFLTLNGKKYYFDNDSKAVTGWQTIDSKKYYFNLNTAVAVTGWQTIDGEKYYFNLNTAEAATGWQTIDGKRYYFNTNTYIASTGYTIINGKHFYFNTDGIMQIGVFKGPDGFEYFAPANTHNNNIEGQAILYQNKFLTLNGKKYYFGSDSKAVTGLRTIDGKKYYFNTNTAVAVTGWQTINGKKYYFNTNTYIASTGYTIISGKHFYFNTDGIMQIGVFKGPDGFEYFAPANTDANNIEGQAIRYQNRFLYLHDNIYYFGNDSKAATGWATIDGNRYYFEPNTAMGANGYKTIDNKNFYFRNGLPQIGVFKGPNGFEYFAPANTDANNIDGQAIRYQNRFLHLLGNIYYFGNNSKAVTGWQTINGKVYYFMPDTAMAAAGGLFEIDGAIYFFGVDGVKAPGIYG

SEQ ID NO: 789 - protein, 2710 aa, Clostridium difficile
MSLISKEELIKLAYSIRPRENEYKTILTNLDEYNKLTTNNNENKYLQLKKLNESIDVFMNKYKNSSRNRALSNLKKDILKEVILIKNSNTSPVEKNLHFVWIGGEVSDIALEYIKQWADINAEYNIKLWYDSEAFLVNTLKKAIVESSTTEALQLLEEEIQNPQFDNTKFYKKRMEFIYDRQKRFINYYKSQINKPTVPTIDDIIKSHLVSEYNRDETLLESYRTNSLRKINSNHGIDIRANSLFTEQELLNIYSQELLNRGNLAAASDIVRLLALKNFGGVYLDVDMLPGIHSDLFKTIPRPSSIGLDRWEMIKLEAIMKYKKYINNYTSENFDKLDQQLKDNFKLIIESKSEKSEIFSKLENLNVSDLEIKIAFALGSVINQALISKQGSYLTNLVIEQVKNRYQFLNQHLNPAIESDNNFTDTTKIFHDSLFNSATAENSMFLTKIAPYLQVGFMPEARSTISLSGPGAYASAYYDFINLQENTIEKTLKASDLIEFKFPENNLSQLTEQEINSLWSFDQASAKYQFEKYVRDYTGGSLSEDNGVDFNKNTALDKNYLLNNKIPSNNVEEAGSKNYVHYIIQLQGDDISYEATCNLFSKNPKNSIIIQRNMNESAKSYFLSDDGESILELNKYRIPERLKNKEKVKVTFIGHGKDEFNTSEFARLSVDSLSNEISSFLDTIKLDISPKNVEVNLLGCNMFSYDFNVEETYPGKLLLSIMDKITSTLPDVNKDSITIGANQYEVRINSEGRKELLAHSGKWINKEEAIMSDLSSKEYIFFDSIDNKLKAKSKNIPGLASISEDIKTLLLDASVSPDTKFILNNLKLNIESSIGDYIYYEKLEPVKNIIHNSIDDLIDEFNLLENVSDELYELKKLNNLDEKYLISFEDISKNNSTYSVRFINKSNGESVYVETEKEIFSKYSEHITKEISTIKNSIITDVNGNLLDNIQLDHTSQVNTLNAAFFIQSLIDYSSNKDVLNDLSTSVKVQLYAQLFSTGLNTIYDSIQLVNLISNAVNDTINVLPTITEGIPIVSTILDGINLGAAIKELLDEHDPLLKKELEAKVGVLAINMSLSIAATVASIVGIGAEVTIFLLPIAGISAGIPSLVNNELILHDKATSVVNYFNHLSESKKYGPLKTEDDKILVPIDDLVISEIDFNNNSIKLGTCNILAMEGGSGHTVTGNIDHFFSSPYISSHIPSLSVYSAIGIKTENLDFSKKIMMLPNAPSRVFWWETGAVPGLRSLENDGTKLLDSIRDLYPGKFYWRFYAFFDYAITTLKPVYEDTNTKIKLDKDTRNFIMPTITTDEIRNKLSYSFDGAGGTYSLLLSSYPISMNINLSKDDLWIFNIDNEVREISIENGTIKKGNLIEDVLSKIDINKNKLIIGNQTIDFSGDIDNKDRYIFLTCELDDKISLIIEINLVAKSYSLLLSGDKNYLISNLSNTIEKINTLGLDSKNIAYNYTDESNNKYFGAISKTSQKSIIHYKKDSKNILEFYNGSTLEFNSKDFIAEDINVFMKDDINTITGKYYVDNNTDKSIDFSISLVSKNQVKVNGLYLNESVYSSYLDFVKNSDGHHNTSNFMNLFLNNISFWKLFGFENINFVIDKYFTLVGKTNLGYVEFICDNNKNIDIYFGEWKTSSSKSTIFSGNGRNVVVEPIYNPDTGEDISTSLDFSYEPLYGIDRYINKVLIAPDLYTSLININTNYYSNEYYPEIIVLNPNTFHKKVNINLDSSSFEYKWSTEGSDFILVRYLEESNKKILQKIRIKGILSNTQSFNKMSIDFKDIKKLSLGYIMSNFKSFNSENELDRDHLGFKIIDNKTYYYDEDSKLVKGLININNSLFYFDPIESNLVTGWQTINGKKYYFDINTGAASTSYKIINGKHFYFNNDGVMQLGVFKGPDGFEYFAPANTQNNNIEGQAIVYQSKFLTLNGKKYYFDNDSKAVTGWRIINNEKYYFNPNNAIAAVGLQVIDNNKYYFNPDTAIISKGWQTVNGSRYYFDTDTAIAFNGYKTIDGKHFYFDSDCVVKIGVFSGSNGFEYFAPANTYNNNIEGQAIVYQSKFLTLNGKKYYFDNNSKAVTGWQTIDSKKYYFNTNTAEAATGWQTIDGKKYYFNTNTAEAATGWQTIDGKKYYFNTNTSIASTGYTIINGKHFYFNTDGIMQIGVFKGPNGFEYFAPANTHNNNIEGQAILYQNKFLTLNGKKYYFGSDSKAITGWQTIDGKKYYFNPNNAIAATHLCTINNDKYYFSYDGILQNGYITIERNNFYFDANNESKMVTGVFKGPNGFEYFAPANTHNNNIEGQAIVYQNKFLTLNGKKYYFDNDSKAVTGWQTIDSKKYYFNLNTAVAVTGWQTIDGEKYYFNLNTAEAATGWQTIDGKRYYFNTNTYIASTGYTIINGKHFYFNTDGIMQIGVFKGPDGFEYFAPANTHNNNIEGQAILYQNKFLTLNGKKYYFGSDSKAVTGLRTIDGKKYYFNTNTAVAVTGWQTINGKKYYFNTNTYIASTGYTIISGKHFYFNTDGIMQIGVFKGPDGFEYFAPANTDANNIEGQAIRYQNRFLYLHDNIYYFGNDSKAATGWATIDGNRYYFEPNTAMGANGYKTIDNKNFYFRNGLPQIGVFKGPNGFEYFAPANTDANNIDGQAIRYQNRFLHLLGNIYYFGNNSKAVTGWQTINGKVYYFMPDTAMAAAGGLFEIDGVIYFFGVDGVKAPGIYG

SEQ ID NO: 790 - protein, 2710 aa, Clostridium difficile
MSLISKEELIKLAYSIRPRENEYKTILTNLDEYNKLTTNNNENKYLQLKKLNESIDVFMNKYKTSSRNRALSNLKKDILKEVILIKNSNTSPVEKNLHFVWIGGEVSDIALEYIKQWADINAEYNIKLWYDSEAFLVNTLKKAIVESSTTEALQLLEEEIQNPQFDNMKFYKKRMEFIYDRQKRFINYYKSQINKPTVPTIDDIIKSHLVSEYNRDETVLESYRTNSLRKINSNHGIDIRANSLFTEQELLNIYSQELLNRGNLAAASDIVRLLALKNFGGVYLDVDMLPGIHSDLFKTISRPSSIGLDRWEMIKLEAIMKYKKYINNYTSENFDKLDQQLKDNFKLIIESKSEKSEIFSKLENLNVSDLEIKIAFALGSVINQALISKQGSYLTNLVIEQVKNRYQFLNQHLNPAIESDNNFTDTTKIFHDSLFNSATAENSMFLTKIAPYLQVGFMPEARSTISLSGPGAYASAYYDFINLQENTIEKTLKASDLIEFKFPENNLSQLTEQEINSLWSFDQASAKYQFEKYVRDYTGGSLSEDNGVDFNKNTALDKNYLLNNKIPSNNVEEAGSKNYVHYIIQLQGDDISYEATCNLFSKNPKNSIIIQRNMNESAKSYFLSDDGESILELNKYRIPERLKNKEKVKVTFIGHGKDEFNTSEFARLSVDSLSNEISSFLDTIKLDISPKNVEVNLLGCNMFSYDFNVEETYPGKLLLSIMDKITSTLPDVNKNSITIGANQYEVRINSEGRKELLAHSGKWINKEEAIMSDLSSKEYIFFDSIDNKLKAKSKNIPGLASISEDIKTLLLDASVSPDTKFILNNLKLNIESSIGDYIYYEKLEPVKNIIHNSIDDLIDEFNLLENVSDELYELKKLNNLDEKYLISFEDISKNNSTYSVRFINKSNGESVYVETEKEIFSKYSEHITKEISTIKNSIITDVNGNLLDNIQLDHTSQVNTLNAAFFIQSLIDYSSNKDVLNDLSTSVKVQLYAQLFSTGLNTIYDSIQLVNLISNAVNDTINVLPTITEGIPIVSTILDGINLGAAIKELLDEHDPLLKKELEAKVGVLAINMSLSIAATVASIVGIGAEVTIFLLPIAGISAGIPSLVNNELILHDKATSVVNYFNHLSESKKYGPLKTEDDKILVPIDDLVISEIDFNNNSIKLGTCNILAMEGGSGHTVTGNIDHFFSSPSISSHIPSLSIYSAIGIETENLDFSKKIMMLPNAPSRVFWWETGAVPGLRSLENDGTRLLDSIRDLYPGKFYWRFYAFFDYAITTLKPVYEDTNIKIKLDKDTRNFIMPTITTNEIRNKLSYSFDGAGGTYSLLLSSYPISTNINLSKDDLWIFNIDNEVREISIENGTIKKGKLIKDVLSKIDINKNKLIIGNQTIDFSGDIDNKDRYIFLTCELDDKISLIIEINLVAKSYSLLLSGDKNYLISNLSNTIEKINTLGLDSKNIAYNYTDESNNKYFGAISKTSQKSIIHYKKDSKNILEFYNDSTLEFNSKDFIAEDINVFMKDDINTITGKYYVDNNTDKSIDFSISLVSKNQVKVNGLYLNESVYSSYLDFVKNSDGHHNTSNFMNLFLDNISFWKLFGFENINFVIDKYFTLVGKTNLGYVEFICDNNKNIDIYFGEWKTSSSKSTIFSGNGRNVVVEPIYNPDTGEDISTSLDFSYEPLYGIDRYINKVLIAPDLYTSLININTNYYSNEYYPEIIVLNPNTFHKKVNINLDSSSFEYKWSTEGSDFILVRYLEESNKKILQKIRIKGILSNTQSFNKMSIDFKDIKKLSLGYIMSNFKSFNSENELDRDHLGFKIIDNKTYYYDEDSKLVKGLININNSLFYFDPIEFNLVTGWQTINGKKYYFDINTGAALTSYKIINGKHFYFNNDGVMQLGVFKGPDGFEYFAPANTQNNNIEGQAIVYQSKFLTLNGKKYYFDNDSKAVTGWRIINNEKYYFNPNNAIAAVGLQVIDNNKYYFNPDTAIISKGWQTVNGSRYYFDTDTAIAFNGYKTIDGKHFYFDSDCVVKIGVFSTSNGFEYFAPANTYNNNIEGQAIVYQSKFLTLNGKKYYFDDNSKAVTGWQTIDSKKYYFNTNTAEAATGWQTIDGKKYYFNTNTAEAATGWQTIDGKKYYFNTNTAIASTGYTIINGKHFYFNTDGIMQIGVFKGPNGFEYFAPANTDANNIEGQAILYQNEFLTLNGKKYYFGSDSKAVTGWRIINNKKYYFNPNNAIAAIHLCTINNDKYYFSYDGILQNGYITIERNNFYFDANNESKMVTGVFKGPNGFEYFAPANTYNNNIEGQAIVYQNKFLTLNGKKYYFDNDSKAVTGWQTIDGKKYYFNLNTAEAATGWQTIDGKKYYFNLNTAEAATGWQTIDGKKYYFNTNTFIASTGYTSINGKHFYFNTDGIMQIGVFKGPNGFEYFAPANTDANNIEGQAILYQNKFLTLNGKKYYFGSDSKAVTGLRTIDGKKYYFNTNTAVAVTGWQTINGKKYYFNTNTSIASTGYTIISGKHFYFNTDGIMQIGVFKGPDGFEYFAPANTDANNIEGQAIRYQNRFLYLHDNIYYFGNNSKAATGWVTIDGNRYYFEPNTAMGANGYKTIDNKNFYFRNGLPQIGVFKGSNGFEYFAPANTDANNIEGQAIRYQNRFLHLLGKIYYFGNNSKAVTGWQTINGKVYYFMPDTAMAAAGGLFEIDGVIYFFGVDGVKAPGIYG

SEQ ID NO: 791 - protein, 2710 aa, Clostridium difficile
MSLISKEELIKLAYSIRPRENEYKTILTNLDEYNKLTTNNNENKYLQLKKLNESIDVFMNKYKTSSRNRALSNLKKDILKEVILIKNSNTSPVEKNLHFVWIGGEVSDIALEYIKQWADINAEYNIKLWYDSEAFLVNTLKKAIVESSTTEALQLLEEEIQNPQFDNMKFYKKRMEFIYDRQKRFINYYKSQINKPTVPTIDDIIKSHLVSEYNRDETVLESYRTNSLRKINSNHGIDIRANSLFTEQELLNIYSQELLNRGNLAAASDIVRLLALKNFGGVYLDVDMLPGIHSDLFKTISRPSSIGLDRWEMIKLEAIMKYKKYINNYTSENFDKLDQQLKDNFKLIIESKSEKSEIFSKLENLNVSDLEIKIAFALGSVINQALISKQGSYLTNLVIEQVKNRYQFLNQHLNPAIESDNNFTDTTKIFHDSLFNSATAENSMFLTKIAPYLQVGFMPEARSTISLSGPGAYASAYYDFINLQENTIEKTLKASDLIEFKFPENNLSQLTEQEINSLWSFDQASAKYQFEKYVRDYTGGSLSEDNGVDFNKNTALYKNYLLNNKIPSNNVEEAGSKNYVHYIIQLQGDDISYEATCNLFSKNPKNSIIIQRNMNESAKSYFLSDDGESILELNKYRIPERLKNKEKVKVTFIGHGKDEFNTSEFARLSVDSLSNEISSFLDTIKLDISPKNVEVNLLGCNMFSYDFNVEETYPGKLLLSIMDKITSTLPDVNKNSITIGANQYEVRINSEGRKELLAHSGKWINKEEAIMSDLSSKEYIFFDSIDNKLKAKSKNIPGLASISEDIKTLLLDASVSPDTKFILNNLKLNIESSIGDYIYYEKLEPVKNIIHNSIDDLIDEFNLLENVSDELYELKKLNNLDEKYLISFEDISKNNSTYSVRFINKSNGESVYVETEKEIFSKYSEHITKEISTIKNSIITDVNGNLLDNIQLDHTSQVNTLNAAFFIQSLIDYSSNKDVLNDLSTSVKVQLYAQLFSTGLNTIYDSIQLVNLISNAVNDTINVLPTITEGIPIVSTILDGINLGAAIKELLDEHDPLLKKELEAKVGVLAINMSLSIAATVASIVGIGAEVTIFLLPIAGISAGIPSLVNNELILHDKATSVVNYFNHLSESKKYGPLKTEDDKILVPIDDLVISEIDFNNNSIKLGTCNILAMEGGSGHTVTGNIDHFFSSPSISSHIPSLSIYSAIGIETENLDFSKKIMMLPNAPSRVFWWETGSVPGLRSLENDGTRLLDSIRDLYPGKFYWRFYAFFDYAITTLKPVYEDTNIKIKLDKDTRNFIMPTITTNEIRNKLSYSFDGAGGTYSLLLSSYPISTNINLSKDDLWIFNIDNEVREISIENGTIKKGKLIKDVLSKIDINKNKLIIGNQTIDFSGDIDNKDRYIFLTCELDDKISLIIEINLVAKSYSLLLSGDKNYLISNLSNTIEKINTLGLDSKNIAYNYTDESNNKYFGAISKTSQKSIIHYKKDSKNILEFYNDSTLEFNSKDFIAEDINVFMKDDINTITGKYYVDNNTDKSIDFSISLVSKNQVKVNGLYLNESVYSSYLDFVKNSDGHHNTSNFMNLFLDNISFWKLFGFENINFVIDKYFTLVGKTNLGYVEFICDNNKNIDIYFGEWKTSSSKSTIFSGNGRNVVVEPIYNPDTGEDISTSLDFSYEPLYGIDRYINKVLIAPDLYTSLININTNYYSNEYYPEIIVLNPNTFHKKVNINLDSSSFEYKWSTEGSDFILVRYLEESNKKILQKIRIKGILSNTQSFNKMSIDFKDIKKLSLGYIMSNFKSFNSENELDRDHLGFKIIDNKTYYYDEDSKLVKGLININNSLFYFDPIEFNLVTGWQTINGKKYYFDINTGAALTSYKIINGKHFYFNNDGVMQLGVFKGPDGFEYFAPANTQNNNIEGQAIVYQSKFLTLNGKKYYFDNNSKAVTGWRIINNEKYYFNPNNAIAAVGLQVIDNNKYYFNPDTAIISKGWQTVNGSRYYFDTDTAIAFNGYKTIDGKHFYFDSDCVVKIGVFSTSNGFEYFAPANTYNNNIEGQAIVYQSKFLTLNGKKYYFDNNSKAVTGWQTIDSKKYYFNTNTAEAATGWQTIDGKKYYFNTNTAEAATGWQTIDGKKYYFNTNTAIASTGYTIINGKHFYFNTDGIMQIGVFKGPNGFEYFAPANTDANNIEGQAILYQNEFLTLNGKKYYFGSDSKAVTGWRIINNKKYYFNPNNAIAAIHLCTINNDKYYFSYDGILQNGYITIERNNFYFDANNESKMVTGVFKGPNGFEYFAPANTHNNNIEGQAIVYQNKFLTLNGKKYYFDNDSKAVTGWQTIDGKKYYFNLNTAEVATGWQTIDGKKYYFNLNTAEAATGWQTIDGKKYYFNTNTFIASTGYTSINGKHFYFNTDGIMQIGVFKGPNGFEYFAPANTDANNIEGQAILYQNKFLTLNGKKYYFGSDSKAVTGLRTIDGKKYYFNTNTAVAVTGWQTINGKKYYFNTNTSIASTGYTIISGKHFYFNTDGIMQIGVFKGPDGFEYFAPANTDANNIEGQAIRYQNRFLYLHDNIYYFGNNSKAATGWVTIDGNRYYFEPNTAMGANGYKTIDNKNFYFRNGLPQIGVFKGSNGFEYFAPANTDANNIEGQAIRYQNRFLHLLGKIYYFGNNSKAVTGWQTINGKVYYFMPDTAMAAAGGLFEIDGVIYFFGVDGVKAPGIYG

SEQ ID NO: 792 - protein, 2710 aa, Clostridium difficile
MSLISKEELIKLAYSIRPRENEYKTILTNLDEYNKLTTNNNENKYLQLKKLNESIDVFMNKYKNSSRNRALSNLKKDILKEVILIKNSNTSPVEKNLHFVWIGGEVSDIALEYIKQWADINAEYNIKLWYDSEAFLVNTLKKAIVESSTTEALQLLEEEIQNPQFDNMKFYKKRMEFIYDRQKRFINYYKSQINKPTVPTIDDIIKSHLVSEYNRDETLLESYRTNSLRKINSNHGIDIRANGLFTEQELLNIYSQELLNRGNLAAASDIVRLLALKNFGGVYLDVDMLPGIHSDLFKTISRPSSIGLDRWEMIKLEAIMKYKKYINNYTSENFDKLDQQLKDNFKLIIESKSEKSEIFSKLENLNVSDLEIKIAFALGSVINQALISKQGSYLTNLVIEQVKNRYQFLNQHLNPAIESDNNFTDTTKIFHDSLFNSATAENSMFLTKIAPYLQVGFMPEARSTISLSGPGAYASAYYDFINLQENTIEKTLKASDLIEFKFPENNLSQLTEQEINSLWSFDQASAKYQFEKYVRDYTGGSLSEDNGVDFNKNTALDKNYLLNNKIPSNNVEEAGSKNYVHYIIQLQGDDISYEATCNLFSKNPKNSIIIQRNMNESAKSYFLSDDGESILELNKYRIPERLKNKEKVKVTFIGHGKDEFNTSEFARLSVDSLSNEISSFLDTIKLDISPKNVEVNLLGCNMFSYDFNVEETYPGKLLLSIMDKITSTLPDVNKNSITIGANQYEVRINSEGRKELLAHSGKWINKEEAIMSDLSSKEYIFFDSIDNKLKAKSKNIPGLASISEDIKTLLLDASVSPDTKFILNNLKLNIESSIGDYIYYEKLEPVKNIIHNSIDDLIDEFNLLENVSDELYELKKLNNLDEKYLISFEDISKNNSTYSVRFINKSNGESVYVETEKEIFSKYSEHITKEISTIKNSIITDVNGNLLDNIQLDHTSQVNTLNAAFFIQSLIDYSSNKDVLNDLSTSVKVQLYAQLFSTGLNTIYDSIQLVNLISNAVNDTINVLPTITEGIPIVSTILDGINLGAAIKELLDEHDPLLKKELEAKVGVLAINMSLSIAATVASIVGIGAEVTIFLLPIAGISAGIPSLVNNELILHDKATSVVNYFNHLSESKKYGPLKTEDDKILVPIDDLVISEIDFNNNSIKLGTCNILAMEGGSGHTVTGNIDHFFSSPSISSHIPSLSIYSAIGIETENLDFSKKIMMLPNAPSRVFWWETGAVPGLRSLENDGTRLLDSIRDLYPGKFYWRFYAFFDYAITTLKPVYEDTNIKIKLDKDTRNFIMPTITTNEIRNKLSYSFDGAGGTYSLLLSSYPISTNINLSKDDLWIFNIDNEVREISIENGTIKKGKLIKDVLSKIDINKNKLIIGNQTIDFSGDIDNKDRYIFLTCELDDKISLIIEINLVAKSYSLLLSGDKNYLISNLSNTIEKINTLGLDSKNIAYNYTDESNNKYFGAISKTSQKSIIHYKKDSKNILEFYNDSTLEFNSKDFIAEDINVFMKDDINTITGKYYVDNNTDKSIDFSISLVSKNQVKVNGLYLNESVYSSYLDFVKNSDGHHNTSNFMNLFLDNISFWKLFGFENINFVIDKYFTLVGKTNLGYVEFICDNNKNIDIYFGEWKTSSSKSTIFSGNGRNVVVEPIYNPDTGEDISTSLDFSYEPLYGIDRYINKVLIAPDLYTSLININTNYYSNEYYPEIIVLNPNTFHKKVNINLDSSSFEYKWSTEGSDFILVRYLEESNKKILQKIRIKGILSNTQSFNKMSIDFKDIKKLSLGYIMSNFKSFNSENELDRDHLGFKIIDNKTYYYDEDSKLVKGLININNSLFYFDPIEFNLVTGWQTINGKKYYFDINTGAALTSYKIINGKHFYFNNDGVMQLGVFKGPDGFEYFAPANTQNNNIEGQAIVYQSKFLTLNGKKYYFDNNSKAVTGWRIINNEKYYFNPNNAIAAVGLQVIDNNKYYFNPDTAIISKGWQTVNGSRYYFDTDTAIAFNGYKTIDGKHFYFDSDCVVKIGVFSTSNGFEYFAPANTYNNNIEGQAIVYQSKFLTLNGKKYYFDNNSKAVTGWQTIDSKKYYFNTNTAEAATGWQTIDGKKYYFNTNTAEAATGWQTIDGKKYYFNTNTAIASTGYTIINGKHFYFNTDGIMQIGVFKGPNGFEYFAPANTDANNIEGQAILYQNEFLTLNGKKYYFGSDSKAVTGWRIINNKKYYFNPNNAIAAIHLCTINNDKYYFSYDGILQNGYITIERNNFYFDANNESKMVTGVFKGPNGFEYFAPANTHNNNIEGQAIVYQNKFLTLNGKKYYFDNDSKAVTGWQTIDGKKYYFNLNTAEAATGWQTIDGKKYYFNLNTAEAATGWQTIDGKKYYFNTNTFIASTGYTSINGKHFYFNTDGIMQIGVFKGPNGFEYFAPANTDANNIEGQAILYQNKFLTLNGKKYYFGSDSKAVTGLRTIDGKKYYFNTNTAVAVTGWQTINGKKYYFNTNTSIASTGYTIISGKHFYFNTDGIMQIGVFKGPDGFEYFAPANTDANNIEGQAIRYQNRFLYLHDNIYYFGNNSKAATGWVTIDGNRYYFEPNTAMGANGYKTIDNKNFYFRNGLPQIGVFKGSNGFEYFAPANTDANNIEGQAIRYQNRFLHLLGKIYYFGNNSKAVTGWQTINGKVYYFMPDTAMAAAGGLFEIDGVIYFFGVDGVKAPGIYG

SEQ ID NO: 793 - protein, 2710 aa, Clostridium difficile
MSLISKEELIKLAYSIRPRENEYKTILTNLDEYNKLTTNNNENKYLQLKKLNESIDVFMNKYKTSSRNRALSNLKKDILKEVILIKNSNTSPVEKNLHFVWIGGEVSDIALEYIKQWADINAEYNIKLWYDSEAFLVNTLKKAIVESSTTEALQLLEEEIQNPQFDNMKFYKKRMEFIYDRQKRFINYYKSQINKPTVPTIDDIIKSHLVSEYNRDETLLESYRTNSLRKINSNHGIDIRANSLFTEQELLNIYSQELLNRGNLAAASDIVRLLALKNFGGVYLDVDMLPGIHSDLFKTISRPSSIGLDRWEMIKLEAIMKYKKYINNYTSENFDKLDQQLKDNFKLIIESKSEKSEIFSKLENLNVSDLEIKIAFALGSVINQALISKQGSYLTNLVIEQVKNRYQFLNQHLNPAIESDNNFTDTTKIFHDSLFNSATAENSMFLTKIAPYLQVGFMPEARSTISLSGPGAYASAYYDFINLQENTIEKTLKASDLIEFKFPENNLSQLTEQEINSLWSFDQASAKYQFEKYVRDYTGGSLSEDNGVDFNKNTALDKNYLLNNKIPSNNVEEAGSKNYVHYIIQLQGDDISYEATCNLFSKNPKNSIIIQRNMNESAKSYFLSDDGESILELNKYRIPERLKNKEKVKVTFIGHGKDEFNTSEFARLSVDSLSNEISSFLDTIKLDISPKNVEVNLLGCNMFSYDFNVEETYPGKLLLSIMDKITSTLPDVNKNSITIGANQYEVRINSEGRKELLAHSGKWINKEEAIMSDLSSKEYIFFDSIDNKLKAKSKNIPGLASISEDIKTLLLDASVSPDTKFILNNLKLNIESSIGDYIYYEKLEPVKNIIHNSIDDLIDEFNLLENVSDELYELKKLNNLDEKYLISFEDISKNNSTYSVRFINKSNGESVYVETEKEIFSKYSEHITKEISTIKNSIITDVNGNLLDNIQLDHTSQVNTLNAAFFIQSLIDYSSNKDVLNDLSTSVKVQLYAQLFSTGLNTIYDSIQLVNLISNAVNDTINVLPTITEGIPIVSTILDGINLGAAIKELLDEHDPLLKKELEAKVGVLAINMSLSIAATVASIVGIGAEVTIFLLPIAGISAGIPSLVNNELILHDKATSVVNYFNHLSESKKYGPLKTEDDKILVPIDDLVISEIDFNNNSIKLGTCNILAMEGGSGHTVTGNIDHFFSSPSISSHIPSLSIYSAIGIETENLDFSKKIMMLPNAPSRVFWWETGAVPGLRSLENDGTRLLDSIRDLYPGKFYWRFYAFFDYAITTLKPVYEDTNIKIKLDKDTRNFIMPTITTNEIRNKLSYSFDGAGGTYSLLLSSYPISTNINLSKDDLWIFNIDNEVREISIENGTIKKGKLIKDVLSKIDINKNKLIIGNQTIDFSGDIDNKDRYIFLTCELDDKISLIIEINLVAKSYSLLLSGNKNYLISNLSNTIEKINTLGLDSKNIAYNYTDESNNKYFGAISKTSQKSIIHYKKDSKNILEFYNDSTLEFNSKDFIAEDINVFMKDDINTITGKYYVDNNTDKGIDFSISLVSKNQVKVNGLYLNESVYSSYLDFVKNSDGHHNTSNFMNLFLDNISFWKLFGFENINFVIDKYFTLVGKTNLGYVEFICDNNKNIDIYFGEWKTSSSKSTIFSGNGRNVVVEPIYNPDTGEDISTSLDFSYEPLYGIDRYINKVLIAPDLYTSLININTNYYSNEYYPEIIVLNPNTFHKKVNINLDSSSFEYKWSTEGSDFILVRYLEESNKKILQKIRIKGILSNTQSFNKMSIDFKDIKKLSLGYIMSNFKSFNSENELDRDHLGFKIIDNKTYYYDEDSKLVKGLININNSLFYFDPIEFNLVTGWQTINGKKYYFDINTGAALTSYKIINGKHFYFNNDGVMQLGVFKGPDGFEYFAPANTQNNNIEGQAIVYQSKFLTLNGKKYYFDNDSKAVTGWRIINNEKYYFNPNNAIAAVGLQVIDNNKYYFNPDTAIISKGWQTVNGSRYYFDTDTAIAFNGYKTIDGKHFYFDSDCVVKIGVFSTSNGFEYFAPANTYNNNIEGQAIVYQSKFLTLNGKKYYFDDNSKAVTGWQTIDSKKYYFNTNTAEAATGWQTIDGKKYYFNTNTAEAATGWQTIDGKKYYFNTNTAIASTGYTIINGKHFYFNTDGIMQIGVFKGPNGFEYFAPANTDANNIEGQAILYQNEFLTLNGKKYYFGSDSKAVTGWRIINNKKYYFNPNNAIAAIHLCTINNDKYYFSYDGILQNGYITIERNNFYFDANNESKMVTGVFKGPNGFEYFAPANTHNNNIEGQAIVYQNKFLTLNGKKYYFDNDSKAVTGWQTIDGKKYYFNLNTAEAATGWQTIDGKKYYFNLNTAEAATGWQTIDGKKYYFNTNTFIASTGYTSINGKHFYFNTDGIMQIGVFKGPNGFEYFAPANTHNNNIEGQAILYQNKFLTLNGKKYYFGSDSKAVTGLRTIDGKKYYFNTNTAVAVTGWQTINGKKYYFNTNTSIASTGYTIISGKHFYFNTDGIMQIGVFKGPDGFEYFAPANTDANNIEGQAIRYQNRFLYLHDNIYYFGNNSKAATGWVTIDGNRYYFEPNTAMGANGYKTIDNKNFYFRNGLPQIGVFKGSNGFEYFAPANTDANNIEGQAIRYQNRFLHLLGKIYYFGNNSKAVTGWQTINGKVYYFMPDTAMAAAGGLFEIDGVIYFFGVDGVKAPGIYG

SEQ ID NO: 794 - protein, 2710 aa, Clostridium difficile
MSLISKEELIKLAYSIRPRENEYKTILTNLDEYNKLTTNNNENKYLQLKKLNESIDVFMNKYKTSSRNRALSNLKKDILKEVILIKNSNTSPVEKNLHFVWIGGEVSDIALEYIKQWADINAEYNIKLWYDSEAFLVNTLKKAIVESSTTEALQLLEEEIQNPQFDNMKFYKKRMEFIYDRQKRFINYYKSQINKPTVPTIDDIIKSHLVSEYNRDETVLESYRTNSLRKINSNHGIDIRANSLFTEQELLNIYSQELLNRGNLAAASDIVRLLALKNFGGVYLDVDMLPGIHSDLFKTISRPSSIGLDRWEMIKLEAIMKYKKYINNYTSENFDKLDQQLKDNFKLIIESKSEKSEIFSKLENLNVSDLEIKIAFALGSVINQALISKQGSYLTNLVIEQVKNRYQFLNQHLNPAIESDNNFTDTTKIFHDSLFNSATAENSMFLTKIAPYLQVGFMPEARSTISLSGPGAYASAYYDFINLQENTIEKTLKASDLIEFKFPENNLSQLTEQEINSLWSFDQASAKYQFEKYVRDYTGGSLSEDNGVDFNKNTALDKNYLLNNKIPSNNVEEAGSKNYVHYIIQLQGDDISYEATCNLFSKNPKNSIIIQRNMNESAKSYFLSDDGESILELNKYRIPERLKNKEKVKVTFIGHGKDEFNTSEFARLSVDSLSNEISSFLDTIKLDISPKNVEVNLLGCNMFSYDFNVEETYPGKLLLSIMDKITSTLPDVNKNSITIGANQYEVRINSEGRKELLAHSGKWINKEEAIMSDLSSKEYIFFDSIDNKLKAKSKNIPGLASISEDIKTLLLDASVSPDTKFILNNLKLNIESSIGDYIYYEKLEPVKNIIHNSIDDLIDEFNLLENVSDELYELKKLNNLDEKYLISFEDISKNNSTYSVRFINKSNGESVYVETEKEIFSKYSEHITKEISTIKNSIITDVNGNLLDNIQLDHTSQVNTLNAAFFIQSLIDYSSNKDVLNDLSTSVKVQLYAQLFSTGLNTIYDSIQLVNLISNAVNDTINVLPTITEGIPIVSTILDGINLGAAIKELLDEHDPLLKKELEAKVGVLAINMSLSIAATVASIVGIGAEVTIFLLPIAGISAGIPSLVNNELILHDKATSVVNYFNHLSESKKYGPLKTEDDKILVPIDDLVISEIDFNNNSIKLGTCNILAMEGGSGHTVTGNIDHFFSSPSISSHIPSLSIYSAIGIETENLDFSKKIMMLPNAPSRVFWWETGAVPGLRSLENDGTRLLDSIRDLYPGKFYWRFYAFFDYAITTLKPVYEDTNIKIKLDKDTRNFIMPTITTNEIRNKLSYSFDGAGGTYSLLLSSYPISTNINLSKDDLWIFNIDNEVREISIENGTIKKGKLIKDVLSKIDINKNKLIIGNQTIDFSGDIDNKDRYIFLTCELDDKISLIIEINLVAKSYSLLLSGDKNYLISNLSNTIEKINTLGLDSKNIAYNYTDESNNKYFGAISKTSQKSIIHYKKDSKNILEFYNDSTLEFNSKDFIAEDINVFMKDDINTITGKYYVDNNTDKSIDFSISLVSKNQVKVNGLYLNESVYSSYLDFVKNSDGHHNTSNFMNLFLDNISFWKLFGFENINFVIDKYFTLVGKTNLGYVEFICDNNKNIDIYFGEWKTSSSKSTIFSGNGRNVVVEPIYNPDTGEDISTSLDFSYEPLYGIDRYINKVLIAPDLYTSLININTNYYSNEYYPEIIVLNPNTFHKKVNINLDSSSFEYKWSTEGSDFILVRYLEESNKKILQKIRIKGILSNTQSFNKMSIDFKDIKKLSLGYIMSNFKSFNSENELDRDHLGFKIIDNKTYYYDEDSKLVKGLININNSLFYFDPIEFNLVTGWQTINGKKYYFDINTGAALTSYKIINGKHFYFNNDGVMQLGVFKGPDGFEYFAPANTQNNNIEGQAIVYQSKFLTLNGKKYYFDNDSKAVTGWRIINNEKYYFNPNNAIAAVGLQVIDNNKYYFNPDTAIISKGWQTVNGSRYYFDTDTAIAFNGYKTIDGKHFYFDSDCVVKIGVFSTSNGFEYFAPANTYNNNIEGQAIVYQSKFLTLNGKKYYFDNNSKAVTGWQTIDSKKYYFNTNTAEAATGWQTIDGKKYYFNTNTAEAATGWQTIDGKKYYFNTNTAIASTGYTIINGKHFYFNTDGIMQIGVFKGPNGFEYFAPANTDANNIEGQAILYQNEFLTLNGKKYYFGSDSKAVTGWRIINNKKYYFNPNNAIAAIHLCTINNDKYYFSYDGILQNGYITIERNNFYFDANNESKMVTGVFKGPNGFEYFAPANTHNNNIEGQAIVYQNKFLTLNGKKYYFDNDSKAVTGWQTIDGKKYYFNLNTAEAATGWQTIDGKKYYFNLNTAEAATGWQTIDGKKYYFNTNTFIASTGYTIINGKHFYFNTDGIMQIGVFKGPNGFEYFAPANTHNNNIEGQAILYQNKFLTLNGKKYYFGSDSKAVTGLRTIDGKKYYFNTNTAVAVTGWQTINGKKYYFNTNTSIASTGYTIISGKHFYFNTDGIMQIGVFKGPDGFEYFAPANTDANNIEGQAIRYQNRFLYLHDNIYYFGNNSKAATGWVTIDGNRYYFEPNTAMGANGYKTIDNKNFYFRNGLPQIGVFKGSNGFEYFAPANTDANNIEGQAIRYQNRFLHLLGKIYYFGNNSKAVTGWQTINGKVYYFMPDTAMAAAGGLFEIDGVIYFFGVDGVKAPGIYG

SEQ ID NO: 795 - protein, 2710 aa, Clostridium difficile
MSLISKEELIKLAYSIRPRENEYKTILTNLDEYNKLTTNNNENKYLQLKKLNESIDVFMNKYKTSSRNRALSNLKKDILKEVILIKNSNTSPVEKNLHFVWIGGEVSDIALEYIKQWADINAEYNIKLWYDSEAFLVNTLKKAIVESSTTEALQLLEEEIQNPQFDNMKFYKKRMEFIYDRQKRFINYYKSQINKPTVPTIDDIIKSHLVSEYNRDETVLESYRTNSLRKINSNHGIDIRANSLFTEQELLNIYSQELLNRGNLAAASDIVRLLALKNFGGVYLDVDMLPGIHSDLFKTISRPSSIGLDRWEMIKLEAIMKYKKYINNYTSENFDKLDQQLKDNFKLIIESKSEKSEIFSKLENLNVSDLEIKIAFALGSVINQALISKQGSYLTNLVIEQVKNRYQFLNQHLNPAIESDNNFTDTTKIFHDSLFNSATAENSMFLTKIAPYLQVGFMPEARSTISLSGPGAYASAYYDFINLQENTIEKTLKASDLIEFKFPKNNLSQLTEQEINSLWSFDQASAKYQFEKYVRDYTGGSLSEDNGVDFNKNTALDKNYLLNNKIPSNNVEEAGSKNYVHYIIQLQGDDISYEATCNLFSKNPKNSIIIQRNMNESAKSYFLSDDGESILELNKYRIPERLKNKEKVKVTFIGHGKDEFNTSEFARLSVDSLSNEISSFLDTIKLDISPKNVEVNLLGCNMFSYDFNVEETYPGKLLLSIMDKITSTLPDVNKNSITIGANQYEVRINSEGRKELLAHSGKWINKEEAIMSDLSSKEYIFFDSIDNKLKAKSKNIPGLASISEDIKTLLLDASVSPDTKFILNNLKLNIESSIGDYIYYEKLEPVKNIIHNSIDDLIDEFNLLENVSDELYELKKLNNLDEKYLISFEDISKNNSTYSVRFINKSNGESVYVETEKEIFSKYSEHITKEISTIKNSIITDVNGNLLDNIQLDHTSQVNTLNAAFFIQSLIDYSSNKDVLNDLSTSVKVQLYAQLFSTGLNTIYDSIQLVNLISNAVNDTINVLPTITEGIPIVSTILDGINLGAAIKELLDEHDPLLKKELEAKVGVLAINMSLSIAATVASIVGIGAEVTIFLLPIAGISAGIPSLVNNELILHDKATSVVNYFNHLSESKKYGPLKTEDDKILVPIDDLVISEIDFNNNSIKLGTCNILAMEGGSGHTVTGNIDHFFSSPSISSHIPSLSIYSAIGIETENLDFSKKIMMLPNAPSRVFWWETGAVPGLRSLENDGTRLLDSIRDLYPGKFYWRFYAFFDYAITTLKPVYEDTNIKIKLDKDTRNFIMPTITTNEIRNKLSYSFDGAGGTYSLLLSSYPISTNINLSKDDLWIFNIDNEVREISIENGTIKKGKLIKDVLSKIDINKNKLIIGNQTIDFSGDIDNKDRYIFLTCELDDKISLIIEINLVAKSYSLLLSGDKNYLISNLSNTIEKINTLGLDSKNIAYNYTDESNNKYFGAISKTSQKSIIHYKKDSKNILEFYNDSTLEFNSKDFIAEDINVFMKDDINTITGKYYVDNNTDKSIDFSISLVSKNQVKVNGLYLNESVYSSYLDFVKNSDGHHNTSNFMNLFLDNISFWKLFGFENINFVIDKYFTLVGKTNLGYVEFICDNNKNIDIYFGEWKTSSSKSTIFSGNGRNVVVEPIYNPDTGEDISTSLDFSYEPLYGIDRYINKVLIAPDLYTSLININTNYYSNEYYPEIIVLNPNTFHKKVNINLDSSSFEYKWSTEGSDFILVRYLEESNKKILQKIRIKGILSNTQSFNKMSIDFKDIKKLSLGYIMSNFKSFNSENELDRDHLGFKIIDNKTYYYDEDSKLVKGLININNSLFYFDPIEFNLVTGWQTINGKKYYFDINTGAALTSYKIINGKHFYFNNDGVMQLGVFKGPDGFEYFAPANTQNNNIEGQAIVYQSKFLTLNGKKYYFDNDSKAVTGWRIINNEKYYFNPNNAIAAVGLQVIDNNKYYFNPDTAIISKGWQTVNGSRYYFDTDTAIAFNGYKTIDGKHFYFDSDCVVKIGVFSTSNGFEYFAPANTYNNNIEGQAIVYQSKFLTLNGKKYYFDNNSKAVTGWQTIDSKKYYFNTNTAEAATGWQTIDGKKYYFNTNTAEAATGWQTIDGKKYYFNTNTAIASTGYTIINGKHFYFNTDGIMQIGVFKGPNGFEYFAPANTDANNIEGQAILYQNEFLTLNGKKYYFGSDSKAVTGWRIINNKKYYFNPNNAIAAIHLCTINNDKYYFSYDGILQNGYITIERNNFYFDANNESKMVTGVFKGPNGFEYFAPANTHNNNIEGQAIVYQNKFLTLNGKKYYFDNDSKAVTGWQTIDGKKYYFNLNTAEAATGWQTIDGKKYYFNLNTAEAATGWQTIDGKKYYFNTNTFIASTGYTSINGKHFYFNTDGIMQIGVFKGPNGFEYFAPANTHNNNIEGQAILYQNKFLTLNGKKYYFGSDSKAVTGLRTIDGKKYYFNTNTAVAVTGWQTINGKKYYFNTNTSIASTGYTIISGKHFYFNTDGIMQIGVFKGPDGFEYFAPANTDANNIEGQAIRYQNRFLYLHDNIYYFGNNSKAATGWVTIDGNRYYFEPNTAMGANGYKTIDNKNFYFRNGLPQIGVFKGSNGFEYFAPANTDANNIEGQAIRYQNRFLHLLGKIYYFGNNSKAVTGWQTINGKVYYFMPDTAMAAAGGLFEIDGVIYFFGVDGVKAPGIYG

SEQ ID NO: 796 - protein, 2710 aa, Clostridium difficile
MSLISKEELIKLAYSIRPRENEYKTILTNLDEYNKLTTNNNENKYLQLKKLNESIDVFMNKYKNSSRNRALSNLKKDILKEVILIKNSNTSPVEKNLHFVWIGGEVSDIALEYIKQWADINAEYNIKLWYDSEAFLVNTLKKAIVESSTTEALQLLEEEIQNPQFDNMKFYKKRMEFIYDRQKRFINYYKSQINKPTVPTIDDIIKSHLVSEYNRDETLLESYRTNSLRKINSNHGIDIRANSLFTEQELLNIYSQELLNRGNLAAASDIVRLLALKNFGGVYLDVDMLPGIHSDLFKTISRPSSIGLDRWEMIKLEAIMKYKKYINNYTSENFDKLDQQLKDNFKLIIESKSEKSEIFSKLENLNVSDLEIKIAFALGSVINQALISKQGSYLTNLVIEQVKNRYQFLNQHLNPAIESDNNFTDTTKIFHDSLFNSATAENSMFLTKIAPYLQVGFMPEARSTISLSGPGAYASAYYDFINLQENTIEKTLKASDLIEFKFPENNLSQLTEQEINSLWSFDQASAKYQFEKYVRDYTGGSLSEDNEVDFNKNTALDKNYLLNNKIPSNNVEEAGSKNYVHYIIQLQGDDISYEATCNLFSKNPKNSIIIQRNMNESAKSYFLSDDGESILELNKYRIPERLKNKEKVKVTFIGHGKDEFNTSEFARLSVDSLSNEISSFLDTIKLDISPKNVEVNLLGCNMFSYDFNVEETYPGKLLLSIMDKITSTLPDVNKDSITIGANQYEVRINSEGRKELLAHSGKWINKEEAIMSDLSSKEYIFFDSIDNKLKAKSKNIPGLASISEDIKTLLLDASVSPDTKFILNNLKLNIESSIGDYIYYEKLEPVKNIIHNSIDDLIDEFNLLENVSDELYELKKLNNLDEKYLISFEDISKNNSTYSVRFINKSNGESVYVETEKEIFSKYSEHITKEISTIKNSIITDVNGNLLDNIQLDHTSQVNTLNAAFFIQSLIDYSSNKDVLNDLSTSVKVQLYAQLFSTGLNTIYDSIQLVNLISNAVNDTINVLPTITEGIPIVSTILDGINLGAAIKELLDEHDPLLKKELEAKVGVLAINMSLSIAATVASIVGIGAEVTIFLLPIAGISAGIPSLVNNELILHDKATSVVNYFNHLSESKEYGPLKTEDDKILVPIDDLVISEIDFNNNAIKLGTCNILAMEGGSGHTVTGNIDHFFSSPSISSHIPSLSIYSAIGIKTENLDFSKKIMMLPNAPSRVFWWETGAVPGLRSLENNGTKLLDSIRDLYPGKFYWRFYAFFDYAITTLKPVYEDTNIKIKLDKDTRNFIMPTITTNEIRNKLSYSFDGAGGTYSLLLSSYPISTNINLSKDDLWIFNIDNEVREISIENGTIKKGKLIKDVLSKIDINKNKLIIGNQTIDFSGDIDNKDRYIFLTCELDDKISLIIEINLVAKSYSLLLSGDKNYLISNLSNTIEKINTLGLDSKNIAYNYTDESNNKYFGAISKTSQKSIIHYKKDSKNILEFYNGSTLEFNSKDFIAEDINVFMKDDINTITGKYYVDNNTDKSIDFSISLVSKNQVKVNGLYLNESVYSSYLDFVKNSDGHHNTSNFMNLFLDNISFWKLFGFENINFVVDKYFTLVGKTNLGYVEFICDNNKNIDIYFGEWKTSSSKSTIFSGNGRNVVVEPIYNPDTGEDISTSLDFSYEPLYGIDRYINKVLIAPDLYTSLININTNYYSNEYYPEIIVLNPNTFHKKVNINLDSSSFEYKWSTEGSDFILVRYLEESNKKILQKIRIKGILSNTQSFNKMSIDFKDIKKLSLVYIMSNFKSFNSENELDRDHLGFKIIDNKTYYYDEASKLVKGLININNSLFYFDPIESNLVTGWQTINGKKYYFDINTGAASTSYKIINGKHFYFNNNGVMQLGVFKGPDGFEYFAPANTQNNNIEGQAIVYQSKFLTLNGKKYYFDNNSKAVTGWRIINNEKYYFNPNNAIAAVGLQVIDNNKYYFNPDTAIISKGWQTVNGSRYYFDTDTAIAFNGYKTIDGKHFYFDSDCVVKIGVFSGSNGFEYFAPANTYNNNIEGQAIVYQSKFLTLNGKKYYFDNNSKAVTGWQTIDSKKYYFNTNTAEAATGWQTIDGKKYYFNTNTAEAATGWQTIDGKKYYFNTNTSIASTGYTIINGKHFYFNTDGIMQIGVFKGPNGFEYFAPANTHNNNIEGQAILYQNKFLTLNGKKYYFGSDSKAITGWQTIDGKKYYFNPNNAIAATHLCTINNDKYYFSYDGILQNGYITIERNNFYFDANNESKMVTGVFKGPNGFEYFAPANTHNNNIEGQAIVYQNKFLTLNGKKYYFDNDSKAVTGWQTIDGKKYYFNLNTAVAVTGWQTIDGKKYYFNLNTAEAATGWQTIDGKKYYFNTNTFIASTGYTIINGKHFYFNTDGIMQIGVFKGTNGFEYFAPANTHNNNIEGQAILYQNKFLTLNGKKYYFGSDSKAVTGLRTIDGKKYYFNTNTAVAVTGWQTINGKKYYFNTNTSIASTGYTIISGKHFYFNTDGIMQIGVFKGSDGFEYFAPANTDANNIEGQAIRYQNRFLYLHDNIYYFGNNSKAVTGWATIDGNRYYFEPDTAMGANGYKTIDNKNFYFRNGLPQIGVFKGPNGFEYFAPANTDANNIDGQAIRYQNRFLHLLGNIYYFGNNSKAVTGWQTINGKVYYFMPDTAMAAAGGLFEIDGVIYFFGVDGVKAPGIYG

SEQ ID NO: 797 - protein, 2710 aa, Clostridium difficile
MSLISKEELIKLAYSIRPRENEYKTILTNLDEYNKLTTNNNENKYLQLKKLNESIDVFMNKYKNSSRNRALSNLKKDILKEVILIKNSNTSPVEKNLHFVWIGGEVSDIALEYIKQWADINAEYNIKLWYDSEAFLVNTLKKAIVESSTTEALQLLEEEIQNPQFDNMKFYKKRMEFIYDRQKRFINYYKSQINKPTVPTIDDIIKSHLVSEYNRDETLLESYRTNSLRKINSNHGIDIRANGLFTEQELLNIYSQELLNRGNLAAASDIVRLLALKNFGGVYLDVDMLPGIHSDLFKTISRPSSIGLDRWEMIKLEAIMKYKKYINNYTSENFDKLDQQLKDNFKLIIESKSEKSEIFSKLENLNVSDLEIKIAFALGSVINQALISKQGSYLTNLVIEQVKNRYQFLNQHLNPAIESDNNFTDTTKIFHDSLFNSATAENSMFLTKIAPYLQVGFMPEARSTISLSGPGAYASAYYDFINLQENTIEKTLKASDLIEFKFPENNLSQLTEQEINSLWSFDQASAKYQFEKYVRDYTGGSLSEDNEVDFNKNTALDKNYLLNNKIPSNNIEEAGSKNYVHYIIQLQGDDISYEATCNLFSKNPKNSIIIQRNMNESAKSYFLSDDGESILELNKYRIPERLKNKEKVKVTFIGHGKDEFNTSEFARLSVDSLSNEISSFLDTIKLDISPKNVEVNLLGCNMFSYDFNVEETYPGKLLLSIMDKITSTLPDVNKDSITIGANQYEVRINSEGRKELLAHSGKWINKEEAIMSDLSSKEYIFFDSIDNKLKAKSKNIPGLASISEDIKTLLLDASVSPDTKFILNNLKLNIESSIGDYIYYEKLEPVKNIIHNSIDDLIDEFNLLENVSDELYELKKLNNLDEKYLISFEDISKNNSTYSVRFINKSNGESVYVETEKEIFSKYSEHITKEISTIKNSIITDVNGNLLDNIQLDHTSQVNTLNAAFFIQSLIDYSSNKDVLNDLSTSVKVQLYAQLFSTGLNTIYDSIQLVNLISNAVNDTINVLPTITEGIPIVSTILDGINLGAAIKELLDEHDPLLKKELEAKVGVLAINMSLSIAATVASIVGIGAEVTIFLLPIAGISAGIPSLVNNELILHDKATSVVNYFNHLSESKEYGPLKTEDDKILVPIDDLVISEIDFNNNAIKLGTCNILAMEGGSGHTVTGNIDHFFSSPSISSHIPSLSIYSAIGIKTENLDFSKKIMMLPNAPSRVFWWETGAVPGLRSLENNGTKLLDSIRDLYPGKFYWRFYAFFDYAITTLKPVYEDTNIKIKLDKDTRNFIMPTITTNEIRNKLSYSFDGAGGTYSLLLSSYPISTNINLSKDDLWIFNIDNEVREISIENGTIKKGKLIKDVLSKIDINKNKLIIGNQTIDFSGDIDNKDRYIFLTCELDDKISLIIEINLVAKSYSLLLSGDKNYLISNLSNTIEKINTLGLDSKNIAYNYTDESNNKYFGAISKTSQKSIIHYKKDSKNILEFYNGSTLEFNSKDFIAEDINVFMKDDINTITGKYYVDNNTDKSIDFSISLVSKNQVKVNGLYLNESVYSSYLDFVKNSDGHHNTSNFMNLFLDNISFWKLFGFENINFVVDKYFTLVGKTNLGYVEFICDNNKNIDIYFGEWKTSSSKSTIFSGNGRNVVVEPIYNPDTGEDISTSLDFSYEPLYGIDRYINKVLIALDLYTSLININTNYYSNEYYPEIIVLNPNTFHKKVNINLDSSSFEYKWSTEGSDFILVRYLEESNKKILQKIRIKGILSNTQSFNKMSIDFKDIKKLSLVYIMSNFKSFNSENELDRDHLGFKIIDNKTYYYDEASKLVKGLININNSLFYFDPIESNLVTGWQTINGKKYYFDINTGAASTSYKIINGKHFYFNNNGVMQLGVFKGPDGFEYFAPANTQNNNIEGQAIVYQSKFLTLNGKKYYFDNNSKAVTGWRIINNEKYYFNPNNAIAAVGLQVIDNNKYYFNPDTAIISKGWQTVNGSRYYFDTDTAIAFNGYKTIDGKHFYFDSDCVVKIGVFSGSNGFEYFAPANTYNNNIEGQAIVYQSKFLTLNGKKYYFDNNSKAVTGWQTIDSKKYYFNTNTAEAATGWQTIDGKKYYFNTNTAEAATGWQTIDGKKYYFNTNTSIASTGYTIINGKHFYFNTDGIMQIGVFKGPNGFEYFAPANTHNNNIEGQAILYQNKFLTLNGKKYYFGSDSKAITGWQTIDGKKYYFNPNNAIAATHLCTINNDKYYFSYDGILQNGYITIERNNFYFDANNESKMVTGVFKGPNGFEYFAPANTHNNNIEGQAIVYQNKFLTLNGKKYYFDNDSKAVTGWQTIDGKKYYFNLNTAVAVTGWQTIDGKKYYFNLNTAEAATGWQTIDGKKYYFNTNTFIASTGYTIINGKHFYFNTDGIMQIGVFKGPNGFEYFAPANTHNNNIEGQAILYQNKFLTLNGKKYYFGSDSKAVTGLRTIDGKKYYFNTNTAVAVTGWQTINGKKYYFNTNTSIASTGYTIISGKHFYFNTDGIMQIGVFKGSDGFEYFAPANTDANNIEGQAIRYQNRFLYLHDNIYYFGNNSKAVTGWATIDGNRYYFEPDTAMGANGYKTIDNKNFYFRNGLPQIGVFKGPNGFEYFAPANTDANNIDGQAIRYQNRFLHLLGNIYYFGNNSKAVTGWQTINGKVYYFMPDTAMAAAGGLFEIDGVIYFFGVDGVKAPGIYG

SEQ ID NO: 798 - protein, 2710 aa, Clostridium difficile
MSLISKEELIKLAYSIRPRENEYKTILTNLDEYNKLTTNNNENKYLQLKKLNESIDVFMNKYKNSSRNRALSNLKKDILKEVILIKNSNTSPVEKNLHFVWIGGEVSDIALEYIKQWADINAEYNIKLWYDSEAFLVNTLKKAIVESSTTEALQLLEEEIQNPQFDNMKFYKKRMEFIYDRQKRFINYYKSQINKPTVPTIDDIIKSHLVSEYNRDETLLESYRTNSLRKINSNHGIDIRANSLFTEQELLNIYSQELLNRGNLAAASDIVRLLALKNFGGVYLDVDMLPGIHSDLFKTIPRPSSIGLDRWEMIKLEAIMKYKKYINNYTSENFDKLDQQLKDNFKLIIESKSEKSEIFSKLENLNVSDLEIKIAFALGSVINQALISKQGSYLTNLVIEQVKNRYQFLNQHLNPAIESDNNFTDTTKIFHDSLFNSATAENSMFLTKIAPYLQVGFMPEARSTISLSGPGAYASAYYDFINLQENTIEKTLKASDLIEFKFPENNLSQLTEQEINSLWSFDQASAKYQFEKYVRDYTGGSLSEDNGVDFNKNTALDKNYLLNNKIPSNNVEEAGSKNYVHYIIQLQGDDISYEATCNLFSKNPKNSIIIQRNMNESAKSYFLSDDGESILELNKYRIPERLKNKEKVKVTFIGHGKDEFNTSEFARLSVDSLSNEISSFLDTIKLDISPKNVEVNLLGCNMFSYDFNVEETYPGKLLLSIMDKITSTLPDVNKDSITIGANQYEVRINSEGRKELLAHSGKWINKEEAIMSDLSSKEYIFFDSIDNKLKAKSKNIPGLASISEDIKTLLLDASVSPDTKFILNNLKLNIESSIGDYIYYEKLEPVKNIIHNSIDDLIDEFNLLENVSDELYELKKLNNLDEKYLISFEDISKNNSTYSVRFINKSNGESVYVETEKEIFSKYSEHITKEISTIKNSIITDVNGNLLDNIQLDHTSQVNTLNAAFFIQSLIDYSSNKDVLNDLSTSVKVQLYAQLFSTGLNTIYDSIQLVNLISNAVNDTINVLPTITEGIPIVSTILDGINLGAAIKELLDEHDPLLKKELEAKVGVLAINMSLSIAATVASIVGIGAEVTIFLLPIAGISAGIPSLVNNELILHDKATSVVNYFNHLSESKKYGPLKTEDDKILVPIDDLVISEIDFNNNSIKLGTCNILAMEGGSGHTVTGNIDHFFSSPYISSHIPSLSVYSAIGIKTENLDFSKKIMMLPNAPSRVFWWETGAVPGLRSLENDGTKLLDSIRDLYPGKFYWRFYAFFDYAITTLKPVYEDTNTKIKLDKDTRNFIMPTITTDEIRNKLSYSFDGAGGTYSLLLSSYPISMNINLSKDDLWIFNIDNEVREISIENGTIKKGNLIEDVLSKIDINKNKLIIGNQTIDFSGDIDNKDRYIFLTCELDDKISLIIEINLVAKSYSLLLSGDKNYLISNLSNTIEKINTLGLDSKNIAYNYTDESNNKYFGAISKTSQKSIIHYKKDSKNILEFYNGSTLEFNSKDFIAEDINVFMKDDINTITGKYYVDNNTDKSIDFSISLVSKNQVKVNGLYLNESVYSSYLDFVKNSDGHHNTSNFMNLFLNNISFWKLFGFENINFVIDKYFTLVGKTNLGYVEFICDNNKNIDIYFGEWKTLSSKSTIFSGNGRNVVVEPIYNPDTGEDISTSLDFSYEPLYGIDRYINKVLIAPDLYTSLININTNYYSNEYYPEIIVLNPNTFHKKVNINLDSSSFEYKWSTEGSDFILVRYLEESNKKILQKIRIKGILSNTQSFNKMSIDFKDIKKLSLGYIMSNFKSFNSENELDRDHLGFKIIDNKTYYYDEDSKLVKGLININNSLFYFDPIESNLVTGWQTINGKKYYFDINTGAASTSYKIINGKHFYFNNNGVMQLGVFKGPDGFEYFAPANTQNNNIEGQAIVYQSKFLTLNGKKYYFDNDSKAVTGWRIINNEKYYFNPNNAIAAVGLQVIDNNKYYFNPDTAIISKGWQTVNGSRYYFDTDTAIAFNGYKTIDGKHFYFDSDCVVKIGVFSGSNGFEYFAPANTYNNNIEGQAIVYQSKFLTLNGKKYYFDNNSKAVTGWQTIDSKKYYFNTNTAEAATGWQTIDGKKYYFNTNTAEAATGWQTIDGKKYYFNTNTSIASTGYTIINGKHFYFNTDGIMQIGVFKGPNGFEYFAPANIHNNNIEGQAILYQNKFLTLNGKKYYFGSDSKAITGWQTIDGKKYYFNPNNAIAATHLCTINNDKYYFSYDGILQNGYITIERNNFYFDANNESKMVTGVFKGPNGFEYFAPANTHNNNIEGQAIVYQNKFLTLNGKKYYFDNDSKAVTGWQTIDSKKYYFNLNTAVAVTGWQTIDGEKYYFNLNTAEAATGWQTIDGKRYYFNTNTYIASTGYTIINGKHFYFNTDGIMQIGVFKGPDGFEYFAPANTHNNNIEGQAILYQNKFLTLNGKKYYFGSDSKAVTGLRTIDGKKYYFNTNTAVAVTGWQTINGKKYYFNTNTYIASTGYTIISGKHFYFNTDGIMQIGVFKGPDGFEYFAPANTDANNIEGQAIRYQNRFLYLHDNIYYFGNDSKAATGWATIDGNRYYFEPNTAMGANGYKTIDNKNFYFRNGLPQIGVFKGPNGFEYFAPANTDANNIDGQAIRYQNRFLHLLGKIYYFGNNSKAVTGWQTINGKVYYFMPDTAMAAAGGLFEIDGVIYFFGVDGVKAPGIYG

SEQ ID NO: 799 - protein, 2710 aa, Clostridium difficile
MSLISKEELIKLAYSIRPRENEYKTILTNLDEYNKLTTNNNENKYLQLKKLNESIDVFMNKYKNSSRNRALSNLKKDILKEVILIKNSNTSPVEKNLHFVWIGGEVSDIALEYIKQWADINAEYNIKLWYDSEAFLVNTLKKAIVESSTTEALQLLEEEIQNPQFDNMKFYKKRMEFIYDRQKRFINYYKSQINKPTVPTIDDIIKSHLVSEYNRDETLLESYRTNSLRKINSNHGIDIRANSLFTEQELLNIYSQELLNRGNLAAASDIVRLLALKNFGGVYLDVDMLPGIHSDLFKTIPRPSSIGLDRWEMIKLEAIMKYKKYINNYTSENFDKLDQQLKDNFKLIIESKSEKSEIFSKLENLNVSDLEIKIAFALGSVINQALISKQGSYLTNLVIEQVKNRYQFLNQHLNPAIESDNNFTDTTKIFHDSLFNSATAENSMFLTKIAPYLQVGFMPEARSTISLSGPGAYASAYYDFINLQENTIEKTLKASDLIEFKFPENNLSQLTEQEINSLWSFDQASAKYQFEKYVRDYTGGSLSEDNGVDFNKNTAFDKNYLLNNKIPSNNVEEAGSKNYVHYIIQLQGDDISYEATCNLFSKNPKNSIIIQRNMNESAKSYFLSDDGESILELNKYRIPERLKNKEKVKVTFIGHGKDEFNTSEFARLSVDSLSNEISSFLDTIKLDISPKNVEVNLLGCNMFSYDFNVEETYPGKLLLSIMDKITSTLPDVNKDSITIGANQYEVRINSEGRKELLAHSGKWINKEEAIMSDLSSKEYIFFDSIDNKLKAKSKNIPGLASISEDIKTLLLDASVSPDTKFILNNLKLNIESSIGDYIYYEKLEPVKNIIHNSIDDLIDEFNLLENVSDELYELKKLNNLDEKYLISFEDISKNNSTYSVRFINKSNGESVYVETEKEIFSKYSEHITKEISTIKNSIITDVNGNLLDNIQLDHTSQVNTLNAAFFIQSLIDYSSNKDVLNDLSTSVKVQLYAQLFSTGLNTIYDSIQLVNLISNAVNDTINVLPTITEGIPIVSTILDGINLGAAIKELLDEHDPLLKKELEAKVGVLAINMSLSIAATVASIVGIGAEVTIFLLPIAGISAGIPSLVNNELILHDKATSVVNYFNHLSESKEYGPLKTEDDKILVPIDDLVISEIDFNNNSIKLGTCNILAMEGGSGHTVTGNIDHFFSSPYISSHIPSLSVYSAIGIKTENLDFSKKIMMLPNAPSRVFWWETGAVPGLRSLENNGTKLLDSIRDLYPGKFYWRFYAFFDYAITTLKPVYEDTNTKIKLDKDTRNFIMPTITTDEIRNKLSYSFDGAGGTYSLLLSSYPISMNINLSKDDLWIFNIDNEVREISIENGTIKKGNLIEDVLSKIDINKNKLIIGNQTIDFSGDIDNKDRYIFLTCELDDKISLIIEINLVAKSYSLLLSGDKNYLISNLSNTIEKINTLGLDSKNIAYNYTDESNNKYFGAISKTSQKSIIHYKKDSKNILEFYNGSTLEFNSKDFIAEDINVFMKDDINTITGKYYVDNNTDKSIDFSISLVSKNQVKVNGLYLNESVYSSYLDFVKNSDGHHNTSNFMNLFLNNISFWKLFGFENINFVIDKYFTLVGKTNLGYVEFICDNNKNIDIYFGEWKTSSSKSTIFSGNGRNVVVEPIYNPDTGEDISTSLDFSYEPLYGIDRYINKVLIAPDLYTSLININTNYYSNEYYPEIIVLNPNTFHKKVNINLDSSSFEYKWSTEGSDFILVRYLEESNKKILQKIRIKGILSNTQSFNKMSIDFKDIKKLSLGYIMSNFKSFNSENELDRDHLGFKIIDNKTYYYDEDSKLVKGLININNSLFYFDPIESNLVTGWQTINGKKYYFDINTGAASTSYKIINGKHFYFNNNGVMQLGVFKGPDGFEYFAPANTQNNNIEGQAIVYQSKFLTLNGKKYYFDNDSKAVTGWRIINNEKYYFNPNNAIAAVGLQVIDNNKYYFNPDTAIISKGWQTVNGSRYYFDTDTAIAFNGYKTIDGKHFYFDSDCVVKIGVFSGSNGFEYFAPANTYNNNIEGQAIVYQSKFLTLNGKKYYFDNNSKAVTGWQTIDSKKYYFNTNTAEAATGWQTIDGKKYYFNTNTAEAATGWQTIDGKKYYFNTNTSIASTGYTIINGKYFYFNTDGIMQIGVFKVPNGFEYFAPANTHNNNIEGQAILYQNKFLTLNGKKYYFGSDSKAITGWQTIDGKKYYFNPNNAIAATHLCTINNDKYYFSYDGILQNGYITIERNNFYFDANNESKMVTGVFKGPNGFEYFAPANTHNNNIEGQAIVYQNKFLTLNGKKYYFDNDSKAVTGWQTIDSKKYYFNLNTAVAVTGWQTIDGEKYYFNLNTAEAATGWQTIDGKRYYFNTNTYIASTGYTIINGKHFYFNTDGIMQIGVFKGPDGFEYFAPANTHNNNIEGQAILYQNKFLTLNGKKYYFGSDSKAVTGLRTIDGKKYYFNTNTAVAVTGWQTINGKKYYFNTNTYIASTGYTIISGKHFYFNTDGIMQIGVFKGPDGFEYFAPANTDANNIEGQAIRYQNRFLYLHDNIYYFGNDSKAATGWATIDGNRYYFEPNTAMGANGYKTIDNKNFYFRNGLPQIGVFKGPNGFEYFAPANTDANNIDGQAIRYQNRFLHLLGKIYYFGNNSKAVTGWQTINSKVYYFMPDTAMAAAGGLFEIDGVIYFFGVDGVKAPGIYG

SEQ ID NO: 800 - protein, 2710 aa, Clostridium difficile
MSLISKEELIKLAYSIRPRENEYKTILTNLDEYNKLTTNNNENKYLQLKKLNESIDVFMNKYKNSSRNRALSNLKKDILKEVILIKNSNTSPVEKNLHFVWIGGEVSDIALEYIKQWADINAEYNIKLWYDSEAFLVNTLKKAIVESSTTEALQLLEEEIQNPQFDNMKFYKKRMEFIYDRQKRFVNYYKSQINKPTVPTIDDIIKSHLVSEYNRDETLLESYRTNSLRKINSNHGIDIRANSLFTEQELLNIYSQELLNRGNLAAASDIVRLLALKNFGGVYLDVDMLPGIHSDLFKTISRPSSIGLDRWEMIKLEAIMKYKKYINNYTSENFDKLDQQLKDNFKLIIESKSEKSEIFSKLENLNVSDLEIKIAFALGSVINQALISKQGSYLTNLVIEQVKNRYQFLNQHLNPAIESDNNFTDTTKIFHDSLFNSATAENSMFLTKIAPYLQVGFMPEARSTISLSGPGAYASAYYDFINLQENTIEKTLKASDLIEFKFPENNLSQLTEQEINSLWSFDQASAKYQFEKYVRDYTGGSLSEDNEVDFNKNTALDKNYLLNNKIPSNNVEEAGSKNYVHYIIQLQGDDISYEATCNLFSKNPKNSIIIQRNMNESAKSYFLSDDGESILELNKYRIPERLKNKEKVKVTFIGHGKDEFNTSEFARLSVDSLSNEISSFLDTIKLDISPKNVEVNLLGCNMFSYDFNVEETYPGKLLLSIMDKITSTLPDVNKDSITIGANQYEVRINSEGRKELLAHSGKWINKEEAIMSDLSSKEYIFFDSIDNKLKAKSKNIPGLASISEDIKTLLLDTSVSPDTKFILNNLKLNIESSVGDYIYYEKLEPVKNIIHNSIDDLIDEFNLLENVSDELYELKKLNNLDEKYLISFEDISKNNSTYSVRFINKSNGESVYVETEKEIFSKYSEHITKEISTIKNSIITDVNGNLLDNIQLDHTSQVNTLNAAFFIQSLIDYSSNKDLLNDLSTSVKVQLYAQLFSTGLNTIYDSIQLVNLISNAVNDTINVLPTITEGIPIVSTILDGINLGAAIKELLDEHDPLLKKELEAKVGVLAINMSLSIAATVASIVGIGAEVTIFLLPIAGISAGIPSLVNNELILHDKATSVVNYFNHLSESKEYGPLKTEDDKILVPIDDLVISEIDFNNNAIKLGTCNILAMEGGSGHTVTGNIDHFFSSPSISSHIPSLSIYSAIGIKTENLDFSKKIMMLPNAPSRVFWWETGAVPGLRSLENNGTKLLDSIRDLYPGKFYWRFYAFFDYAITTLKPVYEDTNIKIKLDKDTRNFIMPTITTNEIRNKLSYSFDGAGGTYSLLLSSYPISTNINLSKDDLWIFNIDNEVREISIENGTIKKGKLIKDVLSKIDINKNKLIIGNQTIDFSGDIDNKDRYIFLTCELDDKISLIIEINLVAKSYSLLLSGDKNYLISNLSNTIEKINTLGLDSKNIAYNYTDESNNKYFGAISKTSQKSIIHYKKDSKNILEFYNGSTLEFNSKDFIAEDINVFMKDDINTITGKYYVDNNTDKSIDFSISLVSKNQAKVNGLYLNESVYSSYLDFVKNADGHHNTSNFMNLFLDNISFWKLFGFENINFVVDKYFTLVGKTNLGYVEFICDNNKNIDIYFGEWKTSSSKSTIFSGNGRNVVVEPIYNPDTGEDISTSLDFSYEPLYGIDRYINKVLIAPDLYTSLININTNYYSNEYYPEIIVLNPNTFHKKVNINLDSSSFEYKWSTEGSDFILVRYLEESNKKILQKIRIKGILSNTQSFNKMSIDFKDIKKLSLVYIMSNFKSFNSENELDRDHLGFKIIDNKTYYYDEASKLVKGLININNSLFYFDPIESNLVTGWQTINGKKYYFDINTGAALTSYKIINGKHFYFNNNGVMQLGVFKGPDGFEYFAPANTQNNNIEGQAIVYQSKFLTLNGKKYYFDNDSKAVTGWRIINNEKYYFNPNNAIAAVGLQVIDNNKYYFNPDTAIISKGWQTVNGSRYYFDTDTAIAFNGYKTIDGKHFYFDSDCVVKIGVFSGSNGFEYFAPANTYNNNIEGQAIVYQSKFLTLNGKKYYFDNNSKAVTGWQTIDSKKYYFNTNTAEAATGWQTIDGKKYYFNTNTAEVATGWQTIDGKKYYFNTNTSIASTGYTIINGKHFYFNTDGIMQIGVFKGPDGFEYFAPANTDANNIEGQAILYQNKFLTLNGKKYYFASDSKAVTGWRIINNKKYYFNPNNAIAATHLYTINNDKYYFSYDGILQNGYITIERNNFYFDANNESKMVTGVFKGPNGFEYFAPANTHNNNIEGQAIVYQNKFLTLNGKKYYFDNDSKAVTGWQTIDGKKYYFNLNTAVAVTGWQTIDGKKYYFNTNTAEAATGWQTIDGKKYYFNTNTSIASTGYTIINGKHFYFNTDGIMQIGVFKGPDGFEYFAPANTDANNIEGQAILYQNKFLTLNGKKYYFASDSKAVTGLRTIDGKKYYFNTNTAEAATGWQTIDGKKYYFNTNTSIASTGYTIINDKHFYFNTDGIMQIGVFKGPDGFEYFAPANTDANNIEGQAIRYQNRFLYLHDNIYYFGNNSKAATGWVTIDGRRYYFEPNTAIGANGYKIIDNKNFYFRNGLPQIGVFKGPNGFEYFAPANTDANNIDGQAIRYQNRFLHLLGNIYYFGNNSKAVTGWQTINGNMYYFMPDTAMAAAGGLFEIDGVIYFFGVDGVKAPGIYG

SEQ ID NO: 801 - protein, 2366 aa, Clostridium difficile; identical to SEQ ID NO: 2

SEQ ID NO: 802 - protein, 2366 aa, Clostridium difficile; identical to SEQ ID NO: 21

SEQ ID NO: 803 - protein, 2367 aa, Clostridium difficile; identical to SEQ ID NO: 121

SEQ ID NO: 804 - protein, 2366 aa, Clostridium difficile; identical to SEQ ID NO: 116

SEQ ID NO: 805 - protein, 2366 aa, Clostridium difficile; identical to SEQ ID NO: 120

SEQ ID NO: 806 - protein, 2366 aa, Clostridium difficile
MSLVNRKQLEKMANVRFRTQEDEYVAILDALEEYHNMSENTVVEKYLKLKDINSLTDIYIDTYKKSGRNKALKKFKEYLVTEVLELKNNNLTPVEKNLHFVWIGGQINDTAINYINQWKDVNSDYNVNVFYDSNAFLINTLKKTIVESATNDTLESFRENLNDPRFDYNKFFRKRMEIIYDKQKNFINYYKAQREENPELIIDDIVKTYLSNEYSKEIDELNAYIEESLNKITQNSGNDVRNFEEFKNGESFNLYEQELVERWNLAAASDILRISALKEIGGVYLDVDMLPGIQPDLFESIEKPSSVTVDFWEMTKLEAIMKYKEYIPGYTSEHFDMLDEEVQSSFESALASKSDKSEIFSSLGDMEASPLEVKIAFNSKGIINQGLISVKDSYCSNLIVKQIENRYKILNNSLNPAISEDNDFNTTTNAFIDSIMAEANADNGRFMMELGKYLRVGFFPDVKTTINLSGPEAYAAAYQDLLMFKEDSMNIHLIEADLRNFEIPKTNISQSTEQEMASLWSFDDARAKAQFEEYKRNYFEGSLGEDDNLDFSQNIVVDKEYLLEKISSLARSSERGYIHYIVQLQGDKISYEAACNLFAKTPYDSILFQKNIEDSEIAYYYNPGDGEIQEIDKYKIPSIISDRPKIKLTFIGHGKDEFNTDIFAGLDVDSLSTEIETAIDLAKEDISPKSIEINLLGCNMFSYSINVEETYPGKLLLKVKDKISELMPSISQDSIIVSANQYEVRINSEGRRELLDHSGEWINKEESIIKDISSKEYISFNPKENKITVKSKNLPELSTLLQEIRNNSNSSDIELEEKVMLTECEINVISNIDTQIVEERIEEAKNLTSDSINYIKNEFKLIESISDALCDLKQQNELDDSHFISFEDISETDEGFSIRFINKETGESIFVETEKTIFSEYANHITEEISKIKDTIFDTVNGKLVKKVNLDTTHEVNTLNAAFFIQSLIEYNSSKESLSNLSVAMKVQVYAQLFSTGLNTITDAAKVVELVSTALDETIDLLPTLSEGLPVIATIIDGVSLGAAIKELSETSDPLLRQEIEAKIGIMAVNLTAATTAIITSSLGIASGFSILLVPLAGISAGIPSLVNNELVLRDKATKVVDYFKHVSLVETEGVFTLLDDKIMMPQDDLVISEIDFNNNSIVLGKCEIWRMEGGSGHTITDDIDHFFSAPSITYREPHLSIYDVLEVQKEELDLSKDLMVLPNAPNRVFAWETGWTPGLRSLENDGTKLLDRIRDHYEGEFYWRYFAFIADALITTLKPRYEDTNIRINLDSNTRSFIVPIITTEYIREKLSYSFYGSGGTYALSLSQYNMGINIELSESDVWIIDVDNVVRDVTIESDKIKKGDLIEGILSTLSIEENKIILNSHEINFSGDVNGSNGFVSLTFSILEGINAIIEVDLLSKSYKLLISGELKILMLNSNHIQQKIDYIGFNSELQKNIPYSFVNDEGKENGFINGSTKEGLFVSELPDVVLISKVYMDDSKPSFGYYSNNLKDVKVITKDDVNILTGYYLKDDIKISLSLTLQDEKTIKLNSVHLDESGVAEILKFMNKKGSTNTSDSLMSFLESMNIKSIFVNFLQSNIKFILDTNFIISGTTSIGQFEFICDENDNIQPYFIKFNTLETNYTLYVGNRQNMIVEPNYDLDDSGDISSTVINFSQKYLYGIDSCVNKVVISPNIYTDEINITPVYETNNTYPEVIVLDANYINEKINVNINDLSIRYVWSNDGNDFILMSTSEENKVSQVKIRFVNVFKDKTLANKLSFNFSDKQDVPVSKIISSFTPSYYDGGLIGYGLGLVSLYNEKFYINNFGMMVSGLIYINDSLYYFKPPVNNLITGFMTVGDDKYYFNPTNGGAASIGETIIDDKNYYFNQSGVLQTGVFSTEDGFKYFAPANTLDENLEGEAIDFTGKLIIDENIYYFEDNYRGAVEWKELDGEMYYFSPETGKAFKGLNQIGDDKYYFNSDGVMQKGFVSINDKKHYFDDSGVMKVGYTEIDGKYFYFAENGEMQIGVFNTEDGFKYFAHHNEDLGNEEGEEISYSGILNFNNKIYYFDDSFTAVVGWKDLEDGSKYYFDEDTAEAYIGLSLINDGQYYFNDDGIMQVGFVAINDKVFYFSDSGIIESGVQNIDDNYFYIDEKGIVQIGVFDTSDGYKYFAPANTVNDNIYGQAVEYSGLVRVGEDVYYFGETYTIETGWIYDMENESDKYYFNPETKKACKGINLIDDIKYYFDENGIMRTGLISFENNDYYFNENGEMQFGYINIEDKMFYFGEDGVMQIGVFNTPDGFKYFAHQNTLDENFEGESINYTGWLDLDEKRYYFTDEYIAATGSVIIDGEEYYFDPDTAQLVISE

SEQ ID NO: 807 - protein, 2366 aa, Clostridium difficile
MSLVNRKQLEKMANVRFRTQEDEYVAILDALEEYHNMSENTVVEKYLKLKDINSLTDIYIDTYKKSGRNKALKKFKEYLVTEVLELKNNNLTPVEKNLHFVWIGGQINDTAINYINQWKDVNSDYNVNVFYDSNAFLINTLKKTVVESAINDTLESFRENLNDPRFDYNKFFRKRMEIIYDKQKNFINYYKAQREENPELIIDDIVKTYLSNEYSKEIDELNTYIEESLNKITQNSGNDVRNFEEFKNGESFNLYEQELVERWNLAAASDILRISALKEIGGMYLDVDMLPGIQPDLFESIEKPSSVTVDFWEMTKLEAIMKYKEYIPEYTSEHFDMLDEEVQSSFESVLASKSDKSEIFSSLGDMEASPLEVKIAFNSKGIINQGLISVKDSYCSNLIVKQIENRYKILNNSLNPAISEDNDFNTTTNTFIDSIMAEANADNGRFMMELGKYLRVGFFPDVKTTINLSGPEAYAAAYQDLLMFKEGSMNIHLIEADLRNFEISKTNISQSTEQEMASLWSFDDSRAKAQFEEYKRNYFEGSLGEDDNLDFSQNIVVDKEYLLEKISSLARSSERGYIHYIVQLQGDKISYEAACNLFAKTPYDSVLFQKNIEDSEIAYYYNPGDGEIQEIDKYKIPSIISDRPKIKLTFIGHGKDEFNTDIFAGFDVDSLSTEIEAAIDLAKEDISPKSIEINLLGCNMFSYSINVEETYPGKLLLKVKDKISELMPSISQDSIIVSANQYEVRINSEGRRELLDHSGEWINKEESIIKDISSKEYISFNPKENKITVKSKNLPELSTLLQEIRNNSNSSDIELEEKVMLTECEINVISNIDTQIVEERIEEAKNLTSDSINYIKDEFKLIESISDALCDLKQQNELEDSHFISFEDISETDEGFSIRFINKETGESIFVETEKTIFSEYANHITEEISKIKGTIFDTVNGKLVKKVNLDTTHEVNTLNAAFFIQSLIEYNSSKESLSNLSVAMKVQVYAQLFSTGLNTITDAAKVVELVSTALDETIDLLPTLSEGLPIIATIIDGVSLGAAIKELSETSDPLLRQEIEAKIGIMAVNLTTATTAIITSSLGIASGFSILLVPLAGISAGIPSLVNNELVLRDKATKVVDYFKHVSLVETEGVFTLLDDKIMMPQDDLVISEIDFNNNSIVLGKCEIWRMEGGSGHTVTDDIDHFFSAPSITYREPHLSIYDVLEVQKEELDLSKDLMVLPNAPNRVFAWETGWTPGLRSLENDGTKLLDRIRDNYEGEFYWRYFAFIADALITTLKPRYEDTNIRINLDSNTRSFIVPIITTEYIREKLSYSFYGSGGTYALSLSQYNMGINIELSESDVWIIDVDNVVRDVTIESDKIKKGDLIEGILSTLSIEENKIILNSHEINFSGEVNGSNGFVSLTFSILEGINAIIEVDLLSKSYKLLISGELKILMLNSNHIQQKIDYIGFNSELQKNIPYSFVDSEGKENGFINGSTKEGLFVSELPDVVLISKVYMDDSKPSFGYYSNNLKDVKVITKDNVNILTGYYLKDDIKISLSLTLQDEKTIKLNSVHLDESGVAEILKFMNRKGNTNTSDSLMSFLESMNIKSIFVNFLQSNIKFILDANFIISGTTSIGQFEFICDENDNIQPYFIKFNTLETNYTLYVGNRQNMIVEPNYDLDDSGDISSTVINFSQKYLYGIDSCVNKVVISPNIYTDEINITPVYETNNTYPEVIVLDANYINEKINVNINDLSIRYVWSNDGNDFILMSTSEENKVSQVKIRFVNVFKDKTLANKLSFNFSDKQDVPVSEIILSFTPSYYEDGLIGYDLGLVSLYNEKFYINNFGMMVSGLIYINDSLYYFKPPVNNLITGFVTVGDDKYYFNPINGGAASIGETIIDDKNYYFNQSGVLQTGVFSTEDGFKYFAPANTLDENLEGEAIDFTGKLIIDENIYYFDDNYRGAVEWKELDGEMHYFSPETGKAFKGLNQIGDDKYYFNSDGVMQKGFVSINDNKHYFDDSGVMKVGYTEIDGKHFYFAENGEMQIGVFNTEDGFKYFAHHNEDLGNEEGEEISYSGILNFNNKIYYFDDSFTAVVGWKDLEDGSKYYFDEDTAEAYIGLSLINDGQYYFNDDGIMQVGFVTINDKVFYFSDSGIIESGVQNIDDNYFYIDDNGIVQIGVFDTSDGYKYFAPANTVNDNIYGQAVEYSGLVRVGEDVYYFGETYTIETGWIYDMENESDKYYFNPETKKACKGINLIDDIKYYFDEKGIMRTGLISFENNNYYFNENGEMQFGYINIEDKMFYFGEDGVMQIGVFNTPDGFKYFAHQNTLDENFEGESINYTGWLDLDEKRYYFTDEYIAATGSVIIDGEEYYFDPDTAQLVISE

SEQ ID NO: 808 - protein, 2366 aa, Clostridium difficile; identical to SEQ ID NO: 115

SEQ ID NO: 809 - protein, 2366 aa, Clostridium difficile; identical to SEQ ID NO: 131

SEQ ID NO: 810 - protein, 2366 aa, Clostridium difficile
MSLVNRKQLEKMANVRFRTQEDEYVAILDALEEYHNMSENTVVEKYLKLKDINSLTDIYIDTYKKSGRNKALKKFKEYLVTEVLELKNNNLTPVEKNLHFVWIGGQINDTAINYINQWKDVNSDYNVNVFYDSNAFLINTLKKTVVESAINDTLESFRENLNDPRFDYNKFFRKRMEIIYDKQKNFINYYKAQREENPELIIDDIVKTYLSNEYSKEIDELNTYIEESLNKITQNSGNDVRNFEEFKNGESFNLYEQELVERWNLAAASDILRISALKEIGGMYLDVDMLPGIQPGLFESIEKPSSVTVDFWEMTKLEAIMKYKEYIPEYTSEHFDMLDEEVQSSFESVLASKSDKSEIFSSLGDMEASPLEVKIAFNSKGIINQGLISVKDSYCSNLIVKQIENRYKILNNSLNPAISEDNDFNTTTNTFIDSIMAEANADNGRFMMELGKYLRVGFFPDVKTTINLSGPEAYAAAYQDLLMFKEGSMNIHLIEADLRNFEISKTNISQSTEQEMASLWSFDDARAKAQFEEYKRNYFEGSLGEDDNLDFSQNIVVDKEYLLEKISSLARSSERGYIHYIVQLQGDKISYEAACNLFAKTPYDSVLFQKNIEDSEIAYYYNPGDGEIQEIDKYKIPSIISDRPKIKLTFIGHGKDEFNTDIFAGFDVDSLSTEIEAAIDLAKEDISPKSIEINLLGCNMFSYSINVEETYPGKLLLKVKDKISELMPSISQDSIIVSANQYEVRINSEGRRELLDHSGEWINKEESIIKDISSKEYISFNPKENKITVKSKNLPELSTLLQEIRNNSNSSDIELEEKVMLTECEINVISNIDTQIVEERIEEAKNLTSDSINYIKDEFKLIESISDALCDLKQQNELEDSHFISFEDISETDEGFSIRFINKETGESIFVETEKTIFSEYANHITEEISKIKGTIFDTVNGKLVKKVNLDTTHEVNTLNAAFFIQSLIEYNSSKESLSNLSVAMKVQVYAQLFSTGLNTITDAAKVVELVSTALDETIDLLPTLSEGLPIIATIIDGVSLGAAIKELSETSDPLLRQEIEAKIGIMAVNLTTATTAIITSSLGIASGFSILLVPLAGISAGIPSLVNNELVLRDKATKVVDYFKHVSLVETEGVFTLLDDKIMMPQDDLVISEIDFNNNSIVLGKCEIWRMEGGSGHTVTDDIDHFFSAPSITYREPHLSIYDVLEVQKEELDLSKDLMVLPNAPNRVFAWETGWTPGLRSLENDGTKLLDRIRDNYEGEFYWRYFAFIADALITTLKPRYEDTNIRINLDSNTRSFIVPIITTEYIREKLSYSFYGSGGTYALSLSQYNMGINIELSESDVWIIDVDNVVRDVTIESDKIKKGDLIEGILSTLSIEENKIILNSHEINFSGEVNGSNGFVSLTFSILEGINAIIEVDLLSKSYKLLISGELKILMLNSNHIQQKIDYIGFNSELQKNIPYSFVDSEGKENGFINGSTKEGLFVSELPDVVLISKVYMDDSKPSFGYYSNNLKDVKVITKDNVNILTGYYLKDDIKISLSLTLQDEKTIKLNSVHLDESGVAEILKFMNRKGNTNTSDSLMSFLESMNIKSIFVNFLQSNIKFILDANFIISGTTSIGQFEFICDENDNIQPYFIKFNTLETNYTLYVGNRQNMIVEPNYDLDDSGDISSTVINFSQKYLYGIDSCVNKVVISPNIYTDEINITPVYETNNTYPEVIVLDANYINEKINVNINDLSIRYVWSNDGNDFILMSTSEENKVSQVKIRFVNVFKDKTLANKLSFNFSDKQDVPVSEIILSFTPSYYEDGLIGYDLGLVSLYNEKFYINNFGMMVSGLIYINDSLYYFKPPVNNLITGFVTVGDDKYYFNPINGGAASIGETIIDDKNYYFNQSGVLQTGVFSTEDGFKYFAPANTLDENLEGEAIDFTGKLIIDENIYYFDDNYRGAVEWKELDGEMHYFSPETGKAFKGLNQIGDYKYYFNSDGVMQKGFVSINDNKHYFDDSGVMKVGYTEIDGKHFYFAENGEMQIGVFNTEDGFKYFAHHNEDLGNEEGEEISYSGILNFNNKIYYFDDSFTAVVGWKDLEDGSKYYFDEDTAEAYIGLSLINDGQYYFNDDGIMQVGFVTINDKVFYFSDSGIIESGVQNIDDNYFYIDDNGIVQIGVFDTSDGYKYFAPANTVNDNIYGQAVEYSGLVRVGEDVYYFGETYTIETGWIYDMENESDKYYFNPETKKACKGINLIDDIKYYFDEKGIMRTGLISFENNNYYFNENGEMQFGYINIEDKMFYFGEDGVMQIGVFNTPDGFKYFAHQNTLDENFEGESINYTGWLDLDEKRYYFTDEYIAATGSVIIDGEEYYFDPDTAQLVISE

SEQ ID NO: 811 - protein, 2367 aa, Clostridium difficile; identical to SEQ ID NO: 126

SEQ ID NO: 812 - protein, 2366 aa, Clostridium difficile; identical to SEQ ID NO: 111

SEQ ID NO: 813 - protein, 2366 aa, Clostridium difficile
MSLVNRKQLEKMANVRFRTQEDEYVAILDALEEYHNMSENTVVEKYLKLKDINSLTDIYIDTYKKSGRNKALKKFKEYLVTEVLELKNNNLTPVEKNLHFVWIGGQINDTAINYINQWKDVNSDYNVNVFYDSNAFLINTLKKTVVESAINDTLESFRENLNDPRFDYNKFFRKRMEIIYDKQKNFINYYKAQREENPELIIDDIVKTYLSNEYSKEIDELNTYIEESLNKITQNSGNDVRNFEEFKNGESFNLYEQELVERWNLAAASDILRISALKEIGGMYLDVDMLPGIQPDLFESIEKPSSVTVDFWEMTKLEAIMKYKEYIPEYTSEHFDMLDEEVQSSFESVLASKSDKSEIFSSLGDMEASPLEVKIAFNSKGIINQGLISVKDSYCSNLIVKQIENRYKILNNSLNPAISEDNDFNTTTNTFIDSIMAEANADNGRFMMELGKYLRVGFFPDVKTTINLSGPEAYAAAYQDLLMFKEGSMNIHLIEADLRNFEISKTNISQSTEQEMASLWSFDDARAKAQFEEYKRNYFEGSLGEDDNLDFSQNIVVDKEYLLEKISSLARSSERGYIHYIVQLQGDKISYEAACNLFAKTPYDSVLFQKNIEDSEIAYYYNPGDGEIQEIDKYKIPSIISDRPKIKLTFIGHGKDEFNTDIFAGFDVDSLSTEIEAAIDLAKEDISPKSIEINLLGCNMFSYSINVEETYPGKLLLKVKDKISELMPSISQDSIIVSANQYEVRINSEGRRELLDHSGEWINKEESIIKDISSKEYISFNPKENKITVKSKNLPELSTLLQEIRNNSNSSDIELEEKVMLTECEINVISNIDTQIVEERIEEAKNLTSDSINYIKDEFKLIESISDALCDLKQQNELEDSHFISFEDISETDEGFSIRFINKETGESIFVETEKTIFSEYANHITEEISKIKGTIFDTVNGKLVKKVNLDTTHEVNTLNAAFFIQSLIEYNSSKESLSNLSVAMKVQVYAQLFSTGLNTITDAAKVVELVSTALDETIDLLPTLSEGLPIIATIIDGVSLGAAIKELSETSDPLLRQEIEAKIGIMAVNLTTATTAIITSSLGIASGFSILLVPLAGISAGIPSLVNNELVLRDKATKVVDYFKHVSLVETEGVFTLLDDKIMMPQDDLVISEIDFNNNSIVLGKCEIWRMEGGSGHTVTDDIDHFFSAPSITYREPHLSIYDVLEVQKEELDLSKDLMVLPNAPNRVFAWETGWTPGLRSLENDGTKLLDRIRDNYEGEFYWRYFAFIADALITTLKPRYEDTNIRINLDSNTRSFIVPIITTEYIREKLSYSFYGSGGTYALSLSQYNMGINIELSESDVWIIDVDNVVRDVTIESDKIKKGDLIEGILSTLSIEENKIILNSHEINFSGEVNGSNGFVSLTFSILEGINAIIEVDLLSKSYKLLISGELKILMLNSNHIQQKIDYIGFNSELQKNIPYSFVDSEGKENGFINGSTKEGLFVSELPDVVLISKVYMDDSKPSFGYYSNNLKDVKVITKDNVNILTGYYLKDDIKISLSLTLQDEKTIKLNSVHLDESGVAEILKFMNRKGSTNTSDSLMSFLESMNIKSIFVNFLQSNIKFILDANFIISGTTSIGQFEFICDENDNIQPYFIKFNTLETNYTLYVGNRQNMIVEPNYDLDDSGDISSTVINFSQKYLYGIDSCVNKVVISPNIYTDEINITPVYETNNTYPEVIVLDANYINEKINVNINDLSIRYVWSNDGNDFILMSTSEENKVSQVKIRFVNVFKDKTLANKLSFNFSDKQDVPVSEIILSFTPSYYEDGLIGYDLGLVSLYNEKFYINNFGMMVSGLIYINDSLYYFKPPVNNLITGFVTVGDDKYYFNPINGGAASIGETIIDDKNYYFNQSGVLQTGVFSTEDGFKYFAPANTLDENLEGEAIDFTGKLIIDENIYYFDDNYRGAVEWKELDGEMHYFSPETGKAFKGLNQIGDDKYYFNSDGVMQKGFVSINDNKHYFDDSGVMKVGYTEIDGKHFYFAENGEMQIGVFNTEDGFKYFAHHNEDLGNEEGEEISYSGILNFNNKIYYFDDSFTAVVGWKDLEDGSKYYFDEDTAEAYIGLSLINDGQYYFNDDGIMQVGFVTINDKVFYFSDSGIIESGVQNIDDNYFYIDDNGIVQIGVFDTSDGYKYFAPANTVNDNIYGQAVEYSGLVRVGEDVYYFGETYTIETGWIYDMENESDKYYFNPETKKACKGINLIDDIKYYFDEKGIMRTGLISFENNNYYFNENGEMQFGYINIEDKMFYFGEDGVMQIGVFNTPDGFKYFAHQNTLDENFEGESINYTGWLDLDEKRYYFTDEYIAATGSVIIDGEEYYFDPDTAQLVISE

SEQ ID NO: 814 - protein, 2366 aa, Clostridium difficile; identical to SEQ ID NO: 114

SEQ ID NO: 815 - protein, 2366 aa, Clostridium difficile; identical to SEQ ID NO: 179

SEQ ID NO: 816 - protein, 2366 aa, Clostridium difficile
MSLVNRKQLEKMANVRFRTQEDEYVAILDALEEYHNMSENTVVEKYLKLKDINSLTDIYIDTYKKSGRNKALKKFKEYLVIEVLELKNNNLTPVEKNLHFVWIGGQINDTAINYINQWKDVNSDYNVNVFYDSNAFLINTLKKTVVESAINDTLESFRENLNDPRFDYNKFFRKRMEIIYDKQKNFINYYKAQREENPELIIDDIVKTYLSNEYSKEIDELNTYIEESLNKITQNSGNDVRNFEEFKNGESFNLYEQELVERWNLAAASDILRISALKEIGGMYLDVDMLPGIQPDLFESIEKPSSVTVDFWEMTKLEAIMKYKEYIPEYTSEHFDMLDEEVQSSFESVLASKSDKSEIFSSLGDMEASPLEVKIAFNSKGIINQGLISVKDSYCSNLIVKQIENRYKILNNSLNPAISEDNDFNTTTNTFIDSIMAEANADNGRFMMELGKYLRVGFFPDVKTTINLSGPEAYAAAYQDLLMFKEGSMNIHLIEADLRNFEISKTNISQSTEQEMASLWSFDDARAKAQFEEYKRNYFEGSLGEDDNLDFSQNIVVDKEYLLEKISSLARSSERGYIHYIVQLQGDKISYEAACNLFAKTPYDSVLFQKNIEDSEIAYYYNPGDGEIQEIDKYKIPSIISDRPKIKLTFIGHGKDEFNTDIFAGFDVDSLSTEIEAAIDLAKEDISPKSIEINLLGCNMFSYSINVEETYPGKLLLKVKDKISELMPSISQDSIIVSANQYEVRINSEGRRELLDHSGEWINKEESIIKDISSKEYISFNPKENKITVKSKNLPELSTLLQEIRNNSNSSDIELEEKVMLTECEINVISNIDTQIVEERIEEAKNLTSDSINYIKDEFKLIESISDALCDLKQQNELEDSHFISFEDISETDEGFSIRFINKETGESIFVETEKTIFSEYANHITEEISKIKGTIFDTVNGKLVKKVNLDTTHEVNTLNAAFFIQSLIEYNSSKESLSNLSVAMKVQVYAQLFSTGLNTITDAAKVVELVSTALDETIDLLPTLSEGLPIIATIIDGVSLGAAIKELSETSDPLLRQEIEAKIGIMAVNLTTATTAIITSSLGIASGFSILLVPLAGISAGIPSLVNNELVLRDKATKVVDYFKHVSLVETEGVFTLLDDKIMMPQDDLVISEIDFNNNSIVLGKCEIWRMEGGSGHTVTDDIDHFFSAPSITYREPHLSIYDVLEVQKEELDLSKDLMVLPNAPNRVFAWETGWTPGLRSLENDGTKLLDRIRDNYEGEFYWRYFAFIADALITTLKPRYEDTNIRINLDSNTRSFIVPIITTEYIREKLSYSFYGSGGTYALSLSQYNMGINIELSESDVWIIDVDNVVRDVTIESDKIKKGDLIEGILSTLSIEENKIILNSHEINFSGEVNGSNGFVSLTFSILEGINAIIEVDLLSKSYKLLISGELKILMLNSNHIQQKIDYIGFNSELQKNIPYSFVDSEGKENGFINGSTKEGLFVSELPDVVLISKVYMDDSKPSFGYYSNNLKDVKVITKDNVNILTGYYLKDDIKISLSLTLQDEKTIKLNSVHLDESGVAEILKFMNRKGSTNTSDSLMSFLESMNIKSIFVNFLQSNIKFILDANFIISGTTSIGQFEFICDENDNIQPYFIKFNTLETNYTLYVGNRQNMIVEPNYDLDDSGDISSTVINFSQKYLYGIDSCVNKVVISPNIYTDEINITPVYETNNTYPEVIVLDANYINEKINVNINDLSIRYVWSNDGNDFILMSTSEENKVSQVKIRFVNVFKDKTLANKLSFNFSDKQDVPVSEIILSFTPSYYEDGLIGYDLGLVSLYNEKFYINNFGMMVSGLIYINDSLYYFKPPVNNLITGFVTVGDDKYYFNPINGGAASIGETIIDDKNYYFNQSGVLQTGVFSTEDGFKYFAPANTLDENLEGEAIDFTGKLIIDENIYYFDDNYRGAVEWKELDGEMHYFSPETGKAFKGLNQIGDDKYYFNSDGVMQKGFVSINDNKHYFDDSGVMKVGYTEIDGKHFYFAENGEMQIGVFNTEDGFKYFAHHNEDLGNEEGEEISYSGILNFNNKIYYFDDSFTAVVGWKDLEDGSKYYFDEDTAEAYIGLSLINDGQYYFNDDGIMQVGFVTINDKVFYFSDSGIIESGVQNIDDNYFYIDDNGIVQIGVFDTSDGYKYFAPANTVNDNIYGQAVEYSGLVRVGEDVYYFGETYTIETGWIYDMENESDKYYFNPETKKACKGINLIDDIKYYFDEKGIMRTGLISFENNNYYFNENGEMQFGYINIEDKMFYFGEDGVMQIGVFNTPDGFKYFAHQNTLDENFEGESINYTGWLDLDEKRYYFTDEYIAATGSVIIDGEEYYFDPDTAQLVISE

SEQ ID NO: 817 - protein, 2366 aa, Clostridium difficile
MSLVNRKQLEKMANVRFRTQEDEYVAILDALEEYHNMSENTVVEKYLKLKDINSLTDIYIDTYKKSGRNKALKKFKEYLVTEVLELKNNNLTPVEKNLHFVWIGGQINDTAINYINQWKDVNSDYNVNVFYDSNAFLINTLKKTVVESAINDTLESFRENLNDPRFDYNKFFRKRMEIIYDKQKNFINYYKAQREENPELIIDDIVKTYLSNEYSKEIDELNTYIEESLNKITQNSGNDVRNFEEFKNGESFNLYEQELVERWNLAAASDILRISALKEIGGMYLDVDMLPGIQPDLFESIEKPSSVTVDFWEMTKLEAIMKYKEYIPEYTSEHFDMLDEEVQSSFESVLASKSDKSEIFSSLGDMEASPLEVKIAFNSKGIINQGLISVKDSYCSNLIVKQIENRYKILNNSLNPAISEDNDFNTTTNTFIDSIMAEANADNGRFMMELGKYLRVGFFPDVKTTINLSGPEAYAAAYQDLLMFKEGSMNIHLIEADLRNFEISKTNISQSTEQEMASLWSFDDARAKAQFEEYKRNYFEGSLGEDDNLDFSQNIVVDKEYLLEKISSLARSSERGYIHYIVQLQGDKISYEAACNLFAKTPYDSVLFQKNIEDSEIAYYYNPGDGEIQEIDKYKIPSIISDRPKIKLTFIGHGKDEFNTDIFAGFDVDSLSTEIEAAIDLAKEDISPKSIEINLLGCNMFSYSINVEETYPGKLLLKVKDKISELMPSISQDSIIVSANQYEVRINSEGRRELLDHSGEWINKEESIIKDISSKEYISFNPKENKITVKSKNLPELSTLLQEIRNNSNSSDIELEEKVMLTECEINVISNIDTQIVEERIEEAKNLTSDSINYIKDEFKLIESISDALCDLKQQNELEDSHFISFEDISETEEGFSIRFINKETGESIFVETEKTIFSEYANHITEEISKIKGTIFDTVNGKLVKKVNLDTTHEVNTLNAAFFIQSLIEYNSSKESLSNLSVAMKVQVYAQLFSTGLNTITDAAKVVELVSTALDETIDLLPTLSEGLPIIATIIDGVSLGAAIKELSETSDPLLRQEIEAKIGIMAVNLTTATTAIITSSLGIASGFSILLVPLAGISAGIPSLVNNELVLRDKATKVVDYFKHVSLVETEGVFTLLDDKIMMPQDDLVISEIDFNNNSIVLGKCEIWRMEGGSGHTVTDDIDHFFSAPSITYREPHLSIYDVLEVQKEELDLSKDLMVLPNAPNRVFAWETGWTPGLRSLENDGTKLLDRIRDNYEGEFYWRYFAFIADALITTLKPRYEDTNIRINLDSNTRSFIVPIITTEYIREKLSYSFYGSGGTYALSLSQYNMGINIELSESDVWIIDVDNVVRDVTIESDKIKKGDLIEGILSTLSIEENKIILNSHEINFSGEVNGSNGFVSLTFSILEGINAIIEVDLLSKSYKLLISGELKILMLNSNHIQQKIDYIGFNSELQKNIPYSFVDSEGKENGFINGSTKEGLFVSELPDVVLISKVYMDDSKPSFGYYSNNLKDVKVITKDNVNILTGYYLKDDIKISLSLTLQDEKTIKLNSVHLDESGVAEILKFMNRKGNTNTSDSLMSFLESMNIKSIFVNFLQSNIKFILDANFIISGTTSIGQFEFICDENDNIQPYFIKFNTLETNYTLYVGNRQNMIVEPNYDLDDSGDISSTVINFSQKYLYGIDSCVNKVVISPNIYTDEINITPVYETNNTYPEVIVLDANYINEKINVNINDLSIRYVWSNDGNDFILMSTSEENKVSQVKIRFVNVFKDKTLANKLSFNFSDKQDVPVSEIILSFTPSYYEDGLIGYDLGLVSLYNEKFYINNFGMMVSGLIYINDSLYYFKPPVNNLITGFVTVGDDKYYFNPINGGAASIGETIIDDKNYYFNQSGVLQTGVFSTEDGFKYFAPANTLDENLEGEAIDFTGKLIIDENIYYFDDNYRGAVEWKELDGEMHYFSPETGKAFKGLNQIGDDKYYFNSDGVMQKGFVSINDNKHYFDDSGVMKVGYTEIDGKHFYFAENGEMQIGVFNTEDGFKYFAHHNEDLGNEEGEEISYSGILNFNNKIYYFDDSFTAVVGWKDLEDGSKYYFDEDTAEAYIGLSLINDGQYYFNDDGIMQVGFVTINDKVFYFSDSGIIESGVQNIDDNYFYIDDNGIVQIGVFDTSDGYKYFAPANTVNDNIYGQAVEYSGLVRVGEDVYYFGETYTIETGWIYDMENESDKYYFNPETKKACKGINLIDDIKYYFDEKGIMRTGLISFENNNYYFNENGEMQFGYINIEDKMFYFGEDGVMQIGVFNTPDGFKYFAHQNTLDENFEGESINYTGWLDLDEKRYYFTDEYIAATGSVIIDGEEYYFDPDTAQLVISE

SEQ ID NO: 818 - protein, 2367 aa, Clostridium difficile
MSLVNRKQLEKMANVRFRVQEDEYVAILDALEEYHNMSENTVVEKYLKLKDINSLTDTYIDTYKKSGRNKALKKFKEYLVTEILELKNSNLTPVEKNLHFIWIGGQINDTAINYINQWKDVNSDYNVNVFYDSNAFLINTLKKTIIESASNDTLESFRENLNDPEFNHTAFFRKRMQIIYDKQQNFINYYKVQKEENPDLIIDDIVKTYLSNEYSKDIDELNAYIEESLNKVTENSGNDVRNFEEFKTGEVFNLYEQELVERWNLAGASDILRVAILKNIGGVYLDVDMLPGIHPDLFKDINKPDSVKTAVDWEEMQLEAIMKYKEYIPEYTSKHFDTLDEEVQSSFESVLASKSDKSEIFLPLGDIEVSPLEVKIAFAKGSIINQALISAKDSYCSDLLIKQIQNRYKILNDTLGPIISQGNDFNTTMNNFGESLGAIANEENISFIAKIGSYLRVGFYPEANTTITLSGPTIYAGAYKDLLTFKEMSIDTSILSSELRNFEFPKVNISQATEQEKNSLWQFNEERAKIQFEEYKKNYFEGALGEDDNLDFSQNTVTDKEYLLEKISSSTKSSERGYVHYIVQLQGDKISYEAACNLFAKNPYDSILFQKNIEDSEVAYYYNPTDSEIQEIDKYRIPDRISDRPKIKLTLIGHGKAEFNTDIFAGLDVDSLSSEIETIIDLAKADISPKSIEINLLGCNMFSYSVNVEETYPGKLLLRVKDKISELMPSISQDSIIVSANQYEVRINSEGRRELLDHSGEWINKEESIIKDISSKEYISFNPKENKIIVKSKNLPELSTLLQEIRNNSNSSDIELEEKVMLAECEINVISNIDTQVVEERIEEAKSLTSDSINYIKNEFKLIESISDALYDLKQQNELEESHFISFEDISETDEGFSIRFIDKETGESIFVETEKAIFSEYANHITEEISKLKDTIFDTVNGKLVKKVNLDATHEVNTLNAAFFIQSLIEYNSSKESLSNLSVAMKVQVYAQLFSTGLNTITDAAKVVELVSTALDETIDLLPTLSEGLPVIATIIDGVSLGAAIKELSETSDPLLRQEIEAKIGIMAVNLTAATTAIITSSLGIASGFSILLVPLAGISAGIPSLVNNELILRDKATKVVDYFSHISLAESEGAFTSLDDKIMMPQDDLVISEIDFNNNSITLGKCEIWRMEGGSGHTVTNDIDHFFSSPSITYREPHLSIYDVLEVKKEELDLSKDLMVLPNAPNRVFGWETGWTPGLRSLENDGTKLLDRIRDQYEGQFYWRFLAFIADALITTLKPRYEDTNVRINLDSNTRSFIVPIITTEYIREKLSYSFYGSGGTYALSLSQYNMNINIELNENDTWVIDVDNVVRDVTIESDKIKKGDLIENILSKLSIEDNKIILDNHEINFSGTLNGGNGFVSLTFSILEGINAVIEVDLLSKSYKVLISGELKTLMANSNSVQQKIDYIGLNSELQKNIPYSFMDDKGKENGFINCSTKEGLFVSELSDVVLISKVYMDDSKPSFGYYSNNLKDVKVITKDNVNILTGYYLKDDIKISLSLTLQDEKTIKLNSVHLDESGVAEILKFMNRKGSTNTSDSLMSFLESMNIKSIFVNFLQSNIKFILDANFIISGTTSIGQFEFICDKDNNIQPYFIKFNTLETKYTLYVGNRQNMIVEPNYDLDDSGDISSTVINFSQKYLYGIDSCVNKVIISPNIYTDEINITPIYEANNTYPEVIVLDTNYISEKINININDLSIRYVWSNDGSDFILMSTDEENKVSQVKIRFTNVFKGNTISDKISFNFSDKQDVSINKIISTFTPSYYVEGLLNYDLGLISLYNEKFYINNFGMMVSGLVYINDSLYYFKPPIKNLITGFTTIGDDKYYFNPDNGGAASVGETIIDGKNYYFSQNGVLQTGVFSTEDGFKYFAPADTLDENLEGEAIDFTGKLTIDENVYYFGDNYRAAIEWQTLDDEVYYFSTDTGRAFKGLNQIGDDKFYFNSDGIMQKGFVNINDKTFYFDDSGVMKSGYTEIDGKYFYFAENGEMQIGVFNTADGFKYFAHHDEDLGNEEGEALSYSGILNFNNKIYYFDDSFTAVVGWKDLEDGSKYYFDEDTAEAYIGLSLINDGQYYFNDDGIMQVGFVAINDKVFYFSDSGIIESGVQNIDDNYFYIDEKGIVQIGVFDTSDGYKYFAPANTVNDNIYGQAVEYSGLVRVGEDVYYFGETYTIETGWIYDMENESDKYYFDPETKKACKGINTIHDIKYYFDETGIMRTGLITFENNHYYFNEDGEMQYGYLNIEDKMFYFSEDGIMQIGVFNTPDGFKYFAHQNTLDENFEGESINYTGWLDLDEKRYYFTDEYIAATGSVIIDGEEYYFDPDTAQLVISE

SEQ ID NO: 819 - protein, 2367 aa, Clostridium difficile
MSLVNRKQLEKMANVRFRVQEDEYVAILDALEEYHNMSENTVVEKYLKLKDINSLTDTYIDTYKKSGRNKALKKFKEYLVTEILELKNSNLTPVEKNLHFIWIGGQINDTAINYINQWKDVNSDYNVNVFYDSNAFLINTLKKTIIESASNDTLESFRENLNDPEFNHTAFFRKRMQIIYDKQQNFINYYKAQKEENPDLIIDDIVKTYLSNEYSKDIDELNAYIEESLNKVTENSGNDVRNFEEFKTGEVFNLYEQELVERWNLAGASDILRVAILKNIGGVYLDVDMLPGIHPDLFKDINKPDSVKTAVDWEEMQLEAIMKYKEYIPEYTSKHFDTLDEEVQSSFESVLASKSDKSEIFLPLGDIEVSPLEVKIAFAKGSIINQALISAKDSYCSDLLIKQIQNRYKILNDTLGPIISQGNDFNTTMNNFGESLGAIANEENISFIAKIGSYLRVGFYPEANTTITLSGPTIYAGAYKDLLTFKEMSIDTSILSSELRNFEFPKVNISQATEQEKNSLWQFNEERAKIQFEEYKKNYFEGALGEDDNLDFSQNTVIDKEYLLEKISSSTKSSERGYVHYIVQLQGDKISYEAACNLFAKNPYDSILFQKNIEDSEVAYYYNPTDSEIQEIDKYRIPDRISDRPKIKLTLIGHGKAEFNTDIFAGLDVDSLSSEIETIIDLAKADISPKSIEINLLGCNMFSYSVNVEETYPGKLLLRVKDKVSELMPSISQDSIIVSANQYEVRINSEGRRELLDHSGEWINKEESIIKDISSKEYISFNPKENKIIVKSKNLPELSTLLQEIRNNSNSSDIELEEKVMLAECEINVISNIETQVVEERIEEAKSLTSDSINYIKNEFKLIESISDALYDLKQQNELEESHFISFEDISETDEGFSIRFIDKETGESIFVETEKAIFSEYANHITEEISKIKGTIFDTVNGKLVKKVNLDATHEVNTLNAAFFIQSLIEYNSSKESLSNLSVAMKVQVYAQLFSTGLNTITDAAKVVELVSTALDETIDLLPTLSEGLPVIATIIDGVSLGAAIKELSETSDPLLRQEIEAKIGIMAVNLTAATTAIITSSLGIASGFSILLVPLAGISAGIPSLVNNELILRDKATKVVDYFSHISLAESEGAFTSLDDKIMMPQDDLVISEIDFNNNSITLGKCEIWRMEGGSGHTVTDDIDHFFSSPSITYREPHLSIYDVLEVKKEELDLSKDLMVLPNAPNRVFGWETGWTPGLRGLENDGTKLLDRIRDQYEGQFYWRFFAFIADALITTLKPRYEDTNVRISLDSNTRSFIVPVITTEYIREKLSYSFYGSGGTYALSLSQYNMNINIELNENDTWVIDVDNVVRSVTIESDKIKKGDLIENILSKLSIEDNKIILDNHEINFSGTLNGGNGFVSLTFSILEGINAVIEVDLLSKSYKVLISGELKTLMANSNSVQQKIDYIGLNSELQKNIPYSFMDDKGKENGFINCSTKEGLFVSELSDVVLIIKVYMDNSKPPFGYYSNDLKDVKAITKDDVIILTGYYLKDDIKISLSFTIQDKNTIKLNGVYLDENGVAEILKFMNKKGSTNTSDSLMSFLESMNIKSIFIKSLKSNAKLILDTNFIISGTTSIGQFEFICDKDNNIQPYFIKFNTLETKYTLYVGNRQNMIVEPNYDLDDSGDISSTVINFSQKYLYGIDSCVNKVIISPNIYTDEINITPIYEANNTYPEVIVLDTNYISEKINININDLSIRYVWSNDGSDFILMSTDEENKVSQVKIRFTNVFKGNTISDKISFNFSDKQDVSINKIISTFTPSYYVEGLLNYHLGLISLYNEKFYINNFGMMVSGLVYINDSLYYFKPPIKNLITGFTTIGDDKYYFNPDNGGAASVGETIIDGKNYYFSPNGVLQTGVFSTEDGFKYFAPADTLDENLEGEAIDFTGKLIIDENVYYFGDNYRAAIEWQTLDDEVYYFSTDTGRAFKGLNQIGDDKFYFNSDGIMQKGFVNINDKTFYFDDSGVMKSGYTEIDGKHFYFAENGEMQIGVFNTADGFKYFAHHDEDLGNEEGEALSYSGILNFNNKIYYFDDSFTAVVGWKDSEDGSKYYFDEDTAEAYIGISTINDGKYYFNDSGIMQIGFVTINNEVFYFSDSGIVESGMQNIDDNYFYIDENGLVQIGVFDTSDGYKYFAPANTVNDNIYGQAVEYSGLVRVGEDVYYFGETYTIETGWIYDMENESDKYYFDPETKKAYKGINVIDDIKYYFDENGIMRTGLITFEDNHYYFNEDGIMQYGYLNIEDKMFYFSEDGIMQIGVFNTPDGFKYFAHQNTLDENFEGESINYTGWLDLDEKRYYFTDEYIAATGSVIIDGEEYYFDPDTAQLVISE

SEQ ID NO: 820 - protein, 2366 aa, Clostridium difficile
MSLVNRKQLEKMANVRFRTQEDEYVAILDALEEYHNMSENTVVEKYLKLKDINSLTDIYIDTYKKSGRNKALKKFKEYLVTEVLELKNNNLTPVEKNLHFVWIGGQINDTAINYINQWKDVNSDYNVNVFYDSNAFLINTLKKTVVESAINDTLESFRENLNDPRFDYNKFFRKRMEIIYDKQKNFINYYKAQREENPELIIDDIVKTYLSNEYSKEIDELNTYIEESLNKITQNSGNDVRNFEEFKNGESFNLYEQELVERWNLAAASDILRISALKEIGGMYLDVDMLPGIQPDLFESIEKPSSVTVDFWEMTKLEAIMKYKEYIPEYTSEHFDMLDEEVQSSFESVLASKSDKSEIFSSLGDMEASPLEVKIAFNSKGIINQGLISVKDSYCSNLIVKQIENRYKILNNSLNPAISEDNDFNTTTNTFIDSIMAEANADNGRFMMELGKYLRVGFFPDVKTTINLSGPEAYAAAYQDLLMFKEGSMNIHLIEADLRNFEIFKTNISQSTEQEMASLWSFDDARAKAQFEEYKRNYFEGSLGEDDNLDFSQNIVVDKEYLLEKISSLARSSERGYIHYIVQLQGDKISYEAACNLFAKTPYDSVLFQKNIEDSEIAYYYNPGDGEIQEIDKYKIPSIISDRPKIKLTFIGHGKDEFNTDIFAGFDVDSLSTEIEAAIDLAKEDISPKSIEINLLGCNMFSYSINVEETYPGKLLLKVKDKISELMPSISQDSIIVSANQYEVRINSEGRRELLDHSGEWINKEESIIKDISSKEYISFNPKENKITVKSKNLPELSTLLQEIRNNSNSSDIELEEKVMLTECEINVISNIDTQIVEERIEEAKNLTSDSINYIKDEFKLIESISDALCDLKQQNELEDSHFISFEDISETDEGFSIRFINKETGESIFVETEKTIFSEYANHITEEISKIKGTIFDTVNGKLVKKVNLDTTHEVNTLNAAFFIQSLIEYNSSKESLSNLSVAMKVQVYAQLFSTGLNTITDAAKVVELVSTALDETIDLLPTLSEGLPIIATIIDGVSLGAAIKELSETSDPLLRQEIEAKIGIMAVNLTTATTAIITSSLGIASGFSILLVPLAGISAGIPSLVNNELVLRDKATKVVDYFKHVSLVETEGVFTLLDDKIMMPQDDLVISEIDFNNNSIVLGKCEIWRMEGGSGHTVTDDIDHFFSAPSITYREPHLSIYDVLEVQKEELDLSKDLMVLPNAPNRVFAWETGWTPGLRSLENDGTKLLDRIRDNYEGEFYWRYFAFIADALITTLKPRYEDTNIRINLDSNTRSFIVPIITTEYIREKLSYSFYGSGGTYALSLSQYNMGINIELSESDVWIIDVDNVVRDVTIESDKIKKGDLIEGILSTLSIEENKIILNSHEINFSGEVNGSNGFVSLTFSILEGINAIIEVDLLSKSYKLLISGELKILMLNSNHIQQKIDYIGFNSELQKNIPYSFVDSEGKENGFINGSTKEGLFVSELPDVVLISKVYMDDSKPSFGYYSNNLKDVKVITKDNVNILTGYYLKDDIKISLSLTLQDEKTIKLNSVHLDESGVAEILKFMNRKGNTNTSDSLMSFLESMNIKSIFVNFLQSNIKFILDANFIISGTTSIGQFEFICDENDNIQPYFIKFNTLETNYTLYVGNRQNMIVEPNYDLDDSGDISSTVINFSQKYLYGIDSCVNKVVISPNIYTDEINITPVYETNNTYPEVIVLDANYINEKINVNINDLSIRYVWSNDGNDFILMSTSEENKVSQVKIRFVNVFKDKTLANKLSFNFSDKQDVPVSEIILSFTPSYYEDGLIGYDLGLVSLYNEKFYINNFGMMVSGLIYINDSLYYFKPPVNNLITGFVTVGDDKYYFNPINGGAASIGETIIDDKNYYFNQSGVLQTGVFSTEDGFKYFAPANTLDENLEGEAIDFTGKLIIDENIYYFDDNYRGAVEWKELDGEMHYFSPETGKAFKGLNQIGDYKYYFNSDGVMQKGFVSINDNKHYFDDSGVMKVGYTEIDGKHFYFAENGEMQIGVFNTEDGFKYFAHHNEDLGNEEGEEISYSGILNFNNKIYYFDDSFTAVVGWKDLEDGSKYYFDEDTAEAYIGLSLINDGQYYFNDDGIMQVGFVTINDKVFYFSDSGIIESGVQNIDDNYFYIDDNGIVQIGVFDTSDGYKYFAPANTVNDNIYGQAVEYSGLVRVGEDVYYFGETYTIETGWIYDMENESDKYYFNPETKKACKGINLIDDIKYYFDEKGIMRTGLISFENNNYYFNENGEMQFGYINIEDKMFYFGEDGVMQIGVFNTPDGFKYFAHQNTLDENFEGESINYTGWLDLDEKRYYFTDEYIAATGSVIIDGEEYYFDPDTAQLVISE

SEQ ID NO: 821 - protein, 2366 aa, Clostridium difficile
MSLVNRKQLEKMANVRFRTQEDEYVAILDALEEYHNMSENTVVEKYLKLKDINSLTDIYIDTYKKSGRNKALKKFKEYLVTEVLELKNNNLTPVEKNLHFVWIGGQINDTAINYINQWKDVNSDYNVNVFYDSNAFLINTLKKTVVESAINDTLESFRENLNDPRFDYNKFFRKRMEIIYDKQKNFINYYKAQREENPELIIDDIVKTYLSNEYSKEIDELNTYIEESLNKITQNSGNDVRNFEEFKNGESFNLYEQELVERWNLAAASDILRISALKEIGGMYLDVDMLPGIQPDLFESIEKPSSVTVDFWEMTKLEAIMKYKEYIPEYTSEHFDMLDEEVQSSFESVLASKSDKSEIFSSLGDMEASPLEVKIAFNSKGIINQGLISVKDSYCSNLIVKQIENRYKILNNSLNPAISEDNDFNTTTNTFIDSIMAEANADNGRFMMELGKYLRVGFFPDVKTTINLSGPEAYAAAYQDLLMFKEGSMNIHLIEADLRNFEISKTNISQSTEQEMASLWSFDDARAKAQFEEYKRNYFEGSLGEDDNLDFSQNIVVDKEYLLEKISSLARSSERGYIHYIVQLQGDKISYEAACNLFAKTPYDSVLFQKNIEDSEIAYYYNPGDGEIQEIDKYKIPSIISDRPKIKLTFIGHGKDEFNTDIFAGFDVDSLSTEIEAAIDLAKEDISPKSIEINLLGCNMFSYSINVEETYPGKLLLKVKDKISELMPSISQDSIIVSANQYEVRINSEGRRELLDHSGEWINKEESIIKDISSKEYISFNPKENKITVKSKNLPELSTLLQEIRNNSNSSDIELEEKVMLTECEINVISNIDTQIVEERIEEAKNLTSDSINYIKDEFKLIESISDALCDLKQQNELEDSHFISFEDISETDEGFSIRFINKETGESIFVETEKTIFSEYANHITEEISKIKGTIFDTVNGKLVKKVNLDTTHEVNTLNAAFFIQSLIEYNSSKESLSNLSVAMKVQVYAQLFSTGLNTITDAAKVVELVSTALDETIDLLPTLSEGLPIIATIIDGISLGAAIKELSETSDPLLRQEIEAKIGIMAVNLTTATTAIITSSLGVASGFSILLVPLAGISAGIPSLVNNELVLRDKATKVVDYFKHVSLVETEGVFTLLDDKIMMPQDDLVISEIDFNNNSIVLGKCEIWRMEGGSGHTVTDDIDHFFSAPSITYREPHLSIYDVLEVQKEELDLSKDLMVLPNAPNRVFAWETGWTPGLRSLENDGTKLLDRIRDNYEGEFYWRYFAFIADALITTLKPRYEDTNIRINLDSNTRSFIVPIITTEYIREKLSYSFYGSGGTYALSLSQYNMGINIELSESDVWIIDVDNVVRDVTIESDKIKKGDLIEGILSTLSIEENKIILNSHEINFSGEVNGSNGFVSLTFSILEGINAIIEVDLLSKSYKLLISGELKILMLNSNHIQQKIDYIGFNSELQKNIPYSFVDSEGKENGFINGSTKEGLFVSELPDVVLISKVYMDDSKPSFGYYSNNLKDVKVITKDNVNILTGYYLKDDIKISLSLTLQDEKTIKLNSVHLDESGVAEILKFMNRKGNTNTSDSLMSFLESMNIKSIFVNFLQSNIKFILDANFIISGTTSIGQFEFICDENDNIQPYFIKFNTLETNYTLYVGNRQNMIVEPNYDLDDSGDISSTVINFSQKYLYGIDSCVNKVVISPNIYTDEINITPVYETNNTYPEVIVLDANYINEKINVNINDLSIRYVWSNDGNDFILMSTSEENKVSQVKIRFVNVFKDKTLANKLSFNFSDKQDVPVSEIILSFTPSYYEDGLIGYDLGLVSLYNEKFYINNFGMMVSGLIYINDSLYYFKPPVNNLITGFVTVGDDKYYFNPINGGAASIGETIIDDKNYYFNQSGVLQTGVFSTEDGFKYFAPANTLDENLEGEAIDFTGKLIIDENIYYFDDNYRGAVEWKELDGEMHYFSPETGKAFKGLNQIGDYKYYFNSDGVMQKGFVSINDNKHYFDDSGVMKVGYTEIDGKHFYFAENGEMQIGVFNTEDGFKYFAHHNEDLGNEEGEEISYSGILNFNNKIYYFDDSFTAVVGWKDLEDGSKYYFDEDTAEAYIGLSLINDGQYYFNDDGIMQVGFVTINDKVFYFSDSGIIESGVQNIDDNYFYIDDNGIVQIGVFDTSDGYKYFAPANTVNDNIYGQAVEYSGLVRVGEDVYYFGETYTIETGWIYDMENESDKYYFNPETKKACKGINLIDDIKYYFDEKGIMRTGLISFENNNYYFNENGEMQFGYINIEDKMFYFGEDGVMQIGVFNTPDGFKYFAHQNTLDENFEGESINYTGWLDLDEKRYYFTDEYIAATGSVIIDGEEYYFDPDTAQLVISE

SEQ ID NO: 822 - protein, 2366 aa, Clostridium difficile
MSLVNRKQLEKMANVRFRTQEDEYVAILDALEEYHNMSENTVVEKYLKLKDINSLTDIYIDTYKKSGRNKALKKFKEYLVTEVLELKNNNLTPVEKNLHFVWIGGQINDTAINYINQWKDVNSDYNVNVFYDSNAFLINTLKKTVVESAINDTLESFRENLNDPRFDYNKFFRKRMEIIYDKQKNFINYYKAQREENPELIIDDIVKTYLSNEYSKEIDELNTYIEESLNKITQNSGNDVRNFEEFKNGESFNLYEQELVERWNLAAASDILRISALKEIGGMYLDVDMLPGIQPDLFESIEKPSSVTVDFWEMTKLEAIMKYKEYIPEYTSEHFDMLDEEVQSSFESVLASKSDKSEIFSSLGDMEASPLEVKIAFNSKGIINQGLISVKDSYCSNLIVKQIENRYKILNNSLNPAISEDNDFNTTTNTFIDSIMAEANADNGRFMMELGKYLRVGFFPDVKTTINLSGPEAYAAAYQDLLMFKEGSMNIHLIEADLRNFEISKTNISQSTEQEMASLWSFDDARAKAQFEEYKRNYFEGSLGEDDNLDFSQNIVVDKEYLLEKISSLARSSERGYIHYIVQLQGDKISYEAACNLFAKTPYDSVLFQKNIEDSEIAYYYNPGDGEIQEIDKYKIPSIISDRPKIKLTFIGHGKDEFNTDIFAGFDVDSLSTEIEAAIDLAKEDISPKSIEINLLGCNMFSYSINVEETYPGKLLLKVKDKISELMPSISQDSIIVSANQYEVRINSEGRRELLDHSGEWINKEESIIKDISSKEYISFNPKENKITVKSKNLPELSTLLQEIRNNSNSSDIELEEKVMLTECEINVISNIDTQIVEERIEEAKNLTSDSINYIKDEFKLIESISDALCDLKQQNELEDSHFISFEDISETEEGFSIRFINKETGESIFVETEKTIFSEYANHITEEISKIKGTIFDTVNGKLVKKVNLDTTHEVNTLNAAFFIQSLIEYNSSKESLSNLSVAMKVQVYAQLFSTGLNTITDAAKVVELVSTALDETIDLLPTLSEGLPIIATIIDGVSLGAAIKELSETSDPLLRQEIEAKIGIMAVNLTTATTAIITSSLGIASGFSILLVPLAGISAGIPSLVNNELVLRDKATKVVDYFKHVSLVETEGVFTLLDDKVMMPQDDLVISEIDFNNNSIVLGKCEIWRMEGGSGHTVTDDIDHFFSAPSITYREPHLSIYDVLEVQKEELDLSKDLMVLPNAPNRVFAWETGWTPGLRSLENDGTKLLDRIRDNYEGEFYWRYFAFIADALITTLKPRYEDTNIRINLDSNTRSFIVPIITTEYIREKLSYSFYGSGGTYALSLSQYNMGINIELSESDVWIIDVDNVVRDVTIESDKIKKGDLIEGILSTLSIEENKIILNSHEINFSGEVNGSNGFVSLTFSILEGINAIIEVDLLSKSYKLLISGELKILMLNSNHIQQKIDYIGFNSELQKNIPYSFVDSEGKENGFINGSTKEGLFVSELPDVVLISKVYMDDSKLSFGYYSNNLKDVKVITKDNVNILTGCYLKDDIKISLSLTLQDEKTIKLNSVHLDESGVAEILKFMNRKGSTNTSDSLMSFLESMNIKSIFVNLLQSNIKFILDANFIISGTTSIGQFEFICDENDNIQPYFIKFNTLETNYTLYVGNRQNMIVEPNYDLDDSGDISSTVINFSQKYLYGIDSCVNKVVISPNIYTDEINITPVYETNNTYPEVVVLDANYINEKINVNINDLSIRYVWSNDGNDFILMSTSEENKVSQVKIRFVNVFKDKTLANKLSFNFSDKQDVPVSEIILSFTPSYYEDGLIGYDLGLVSLYNEKFYINNFGMMVSGLIYINDSLYYFKPPVNNLITGFVTVGDDKYYFNPINGGAASIGETIIDDKNYYFNQSGVLQTGVFSTEDGFKYFAPANTLDENLEGEAIDFTGKLIIDENIYYFEDNYRGAVEWKELDGEMHYFSPETGKAFKGLNQIGDDKYYFNSDGVMQKGFVSINDNKHYFDDSGVMKVGYTEIDGKHFYFAENGEMQIGVFNTEDGFKYFAHHNEDLGNEEGEEISYSGILNFNNKIYYFDDSFTAVVGWKDLEDGSKYYFDEDTAEAYIGLSLINDGQYYFNDDGIMQVGFVTINDKVFYFSDSGIIESGVQNIDDNYFYIDDNGIVQIGVFDTSDGYKYFAPANTVNDNIYGQAVEYSGLVRVGEDVYYFGETYTIETGWIYDMENESDKYYFNPETKKACKGINLIDDIKYYFDEKGIMRTGLISFENNNYYFNENGEMQFGYINIEDKMFYFGEDGVMQIGVFNTPDGFKYFAHQNTLDENFEGESINYTGWLDLDEKRYYFTDEYIAATGSVIIDGEEYYFDPDTAQLVISE

SEQ ID NO: 823 - protein, 2366 aa, Clostridium difficile
MSLVNRKQLEKMANVRFRTQEDEYVAILDALEEYHNMSENTVVEKYLKLKDINSLTDIYIDTYKKSGRNKALKKFKEYLVTEVLELKNNNLTPVEKNLHFVWIGGQINDTAINYINQWKDVNSDYNVNVFYDSNAFLINTLKKTVVESAINDTLESFRENLNDPRFDYNKFFRKRMEIIYDKQKNFINYYKAQREENPELIIDDIVKTYLSNEYSKEIDELNTYIEESLNKITQNSGNDVRNFEEFKNGESFNLYEQELVERWNLAAASDILRISALKEIGGMYLDVDMLPGIQPDLFESIEKPSSVTVDFWEMTKLEAIMKYKEYIPEYTSEHFDMLDEEVQSSFESVLASKSDKSEIFSSLGDMEASPLEVKIAFNSKGIINQGLISVKDSYCSNLIVKQIENRYKILNNSLNPAISEDNDFNTTTNTFIDSIMAEANADNGRFMMELGKYLRVGFFPDVKTTINLSGPEAYAAAYQDLLMFKEGSMNIHLIEADLRNFEISKTNISQSTEQEMASLWSFDDARAKAQFEEYKRNYFEGSLGEDDNLDFSQNIVVDKEYLLEKISSLARSSERGYIHYIVQLQGDKISYEAACNLFAKTPYDSVLFQKNIEDSEIAYYYNPGDGEIQEIDKYKIPSIISDRPKIKLTFIGHGKDEFNTDIFAGFDVDSLSTEIEAAIDLAKEDISPKSIEINLLGCNMFSYSINVEETYPGKLLLKVKDKISELMPSISQDSIIVSANQYEVRINSEGRRELLDHSGEWINKEESIIKDISSKEYISFNPKENKITVKSKNLPELSTLLQEIRNNSNSSDIELEEKVMLTECEINVISNIDTQIVEERIEEAKNLTSDSINYIKDEFKLIESISDALCDLKQQNELEDSHFISFEDISETEEGFSIRFINKETGESIFVETEKTIFSEYANHITEEISKIKGTIFDTVNGKLVKKVNLDTTHEVNTLNAAFFIQSLIEYNSSKESLSNLSVAMKVQVYAQLFSTGLNTITDAAKVVELVSTALDETIDLLPTLSEGLPIIATIIDGVSLGAAIKELSETSDPLLRQEIEAKIGIMAVNLTTATTAIITSSLGIASGFSILLVPLAGISAGIPSLVNNELVLRDKATKVVDYFKHVSLVETEGVFTLLDDKIMMPQDDLVISEIDFNNNSIVLGKCEIWRMEGGSGHTVTDDIDHFFSAPSITYREPHLSIYDVLEVQKEELDLSKDLMVLPNAPNRVFAWETGWTPGLRSLENDGTKLLDRIRDNYEGEFYWRYFAFIADALITTLKPRYEDTNIRINLDSNTRSFIVPIITTEYIREKLSYSFYGSGGTYALSLSQYNMGINIELSESDVWIIDVDNVVRDVTIESDKIKKGDLIEGILSTLSIEENKIILNSHEINFSGDVNGSNGFVSLTFSILEGINAIIEVDLLSKSYKLLISGELKILMLNSNHIQQKIDYIGFNSELQKNIPYSFVDSEGKENGFINGSTKEGLFVSELPDVVLISKVYMDDSKPSFGYYSNNLKDVKVITKDNVNILTGYYLKDDIKISLSLTLQDEKTIKLNSVHLDESGVAEILKFMNRKGNTNTSDSLMSFLESMNIKSIFVNFLQSNIKFILDANFIISGTTSIGQFEFICDENDNIQPYFIKFNTLETNYTLYVGNRQNMIVEPNYDLDDSGDISSTVINFSQKYLYGIDSCVNKVVISPNIYTDEINITPVYETNNTYPEVIVLDANYINEKINVNINDLSIRYVWSNDGNDFILMSTSEENKVSQVKIRFVNVFKDKTLANKLSFNFSDKQDVPISEIILSFTPSYYEDGLIGYDLGLVSLYNEKFYINNFGMMVSGLIYINDSLYYFKPPVNNLITGFVTVGDDKYYFNPINGGAASIGETIIDDKNYYFNQSGVLQTGVFSTEDGFKYFAPANTLDENLEGEAIDFTGKLIIDENIYYFEDNYRGAVEWKELDGEMHYFSPETGKAFKGLNQIGDDKYYFNSDGVMQKGFVSINDNKHYFDDSGVMKVGYTEIDGKYFYFAENGEMQIGVFNTEDGFKYFAHHNEDLGNEEGEEISYSGILNFNNKIYYFDDSFTAVVGWKDLEDGSKYYFDEDTAEAYIGLSLINDGQYYFNDDGIMQVGFVTINDKVFYFSDSGIIESGVQNIDDNYFYIDEKGIVQIGVFDTSDGYKYFAPANTVNDNIYGQAVEYSGLVRVGEDVYYFGETYTIETGWIYDMENESDKYYFNPETKKACKGINLIDDIKYYFDEKGIMRTGLISFENNNYYFNENGEMQFGYINIEDKMFYFGEDGVMQIGVFNTPDGFKYFAHQNTLDENFEGESINYTGWLDLDEKRYYFTDEYIAATGSVIIDGEEYYFDPDTAQLVISE

SEQ ID NO: 824 - protein, 2366 aa, Clostridium difficile
MSLVNRKQLEKMANVRFRTQEDEYVAILDALEEYHNMSENTVVEKYLKLKDINSLTDIYIDTYKKSGRNKALKKFKEYLVTEVLELKNNNLTPVEKNLHFVWIGGQINDTAINYINQWKDVNSDYNVNVFYDSNAFLINTLKKTIVESATNDTLESFRENLNDPRFDYNKFYRKRMEIIYDKQKNFINYYKTQREENPDLIIDDIVKIYLSNEYSKDIDELNSYIEESLNKVTENSGNDVRNFEEFKGGESFKLYEQELVERWNLAAASDILRISALKEVGGVYLDVDMLPGIQPDLFESIEKPSSVTVDFWEMVKLEAIMKYKEYIPGYTSEHFDMLDEEVQSSFESVLASKSDKSEIFSSLGDMEASPLEVKIAFNSKGIINQGLISVKDSYCSNLIVKQIENRYKILNNSLNPAISEDNDFNTTTNAFIDSIMAEANADNGRFMMELGKYLRVGFFPDVKTTINLSGPEAYAAAYQDLLMFKEGSMNIHLIEADLRNFEISKTNISQSTEQEMASLWSFDDARAKAQFEEYKKNYFEGSLGEDDNLDFSQNTVVDKEYLLEKISSLARSSERGYIHYIVQLQGDKISYEAACNLFAKTPYDSVLFQKNIEDSEIAYYYNPGDGEIQEIDKYKIPSIISDRPKIKLTFIGHGKDEFNTDIFAGLDVDSLSTEIETAIDLAKEDISPKSIEINLLGCNMFSYSVNVEETYPGKLLLRVKDKISELMPSISQDSIIVSANQYEVRINSEGRRELLDHSGEWINKEESIIKDISSKEYISFNPKENKIIVKSKNLPELSTLLQEIRNNSNSSDIELEEKVMLAECEINVISNIDTQVVEERIEEAKSLTSDSINYIKNEFKLIESISDALYDLKQQNELEESHFISFEDISETDEGFSIRFIDKETGESIFVETEKAIFSEYANHITEEISKIKGTIFDTVNGKLVKKVNLDATHEVNTLNAAFFIQSLIEYNSSKESLSNLSVAMKVQVYAQLFSTGLNTITDAAKVVELVSTALDETIDLLPTLSEGLPVIATIIDGVSLGAAIKELSETSDPLLRQEIEAKIGIMAVNLTAATTAIITSSLGIASGFSILLVPLAGISAGIPSLVNNELILRDKATKVVDYFSHISLAESEGAFTSLDDKIMMPQDDLVISEIDFNNNSITLGKCEIWRMEGGSGHTVTDDIDHFFSSPSITYREPHLSIYDVLEVKKEELDLSKDLMVLPNAPNRVFGWETGWTPGLRGLENDGTKLLDRIRDQYEGQFYWRFFAFIADALITTLKPRYEDTNVRISLDSNTRSFIVPVITTEYIREKLSYSFYGSGGTYALSLSQYNMNINIELNENDTWVIDVDNVVRDVTIESDKIKKGDLIENILSKLSIEDNKIILDNHEINFSGTLNGGNGFVSLTFSILEGINAVIEVDLLSKSYKVLISGELKTLMANSNSVQQKIDYIGLNSELQKNIPYSFMDDKGKENGFINCSTKEGLFVSELSDVVLIIKVYMDNSKPPFGYYSNDLKDVKAITKDDVIILTGYYLKDDIKISLSFTIQDENTIKLNGVYLDENGVAEILKFMNKKGSTNTSDSLMSFLESMNIKSIFINSLQSNTKLILDTNFIISGATSIGQFEFICDKDNNIQPYFIKFNTLETKYTLYVGNRQNMIVEPNYDLDDSGDISSTVINFSQKYLYGIDSCVNKVIISPNIYTDEINITPIYEANNTYPEVIVLDTNYISEKINININDLSIRYVWSNDGSDFILMSTDEENKVSQVKIRFTNVFKGNTISDKISFNFSDKQDVSINKIISTFTPSYYVEGLLNYHLGLISLYNEKFYINNFGMMVSGLVYINDSLYYFKPPIKNLITGFTTIGDDKYYFNPDNGGAASVGETIIDGKNYYFSQNGVLQTGVFSTEDGFKYFAPADTLDENLEGEAIDFTGKLTIDENVYYFGDNYRAAIEWQTLDDEVYYFSTDTGRAFKGLNQIGDDKFYFNSDGIMQKGFVNINDKTFYFDDSGVMKSGYTEIDGKYFYFAENGEMQIGVFNTADGFKYFAHHDEDLGNEEGEALSYSGILNFNNKIYYFDDSFTAVVGWKDLEDGSKYYFDEDTAEAYIGISIINDGKYYFNDSGIMQIGFVTINNEVFYFSDSGIVESGMQNIDDNYFYIDENGLVQIGVFDTSDGYKYFAPANTVNDNIYGQAVEYSGLVRVGEDVYYFGETYTIETGWIYDMENESDKYYFDPETKKAYKGINVIDDIKYYFDENGIMRTGLITFEDNHYYFNEDGIMQYGYINIEDKMFYFNEDGVMQIGVFNTADGFKYFAHQNTLDENFEGESINYTGWLDLDEKRYYFTDEYIAAIGSVIIDGEEYYFDPDTAELVISE

SEQ ID NO: 825 - protein, 2366 aa, Clostridium difficile
MSLVNRKQLEKMANVRFRTQEDEYVAILDALEEYHNMSENTVVEKYLKLKDINSLTDIYIDTYKKSGRNKALKKFKEYLVTEVLELKNNNLTPVEKNLHFVWIGGQINDTAINYINQWKDVNSDYNVNVFYDSNAFLINTLKKTVVESAINDTLESFRENLNDPRFDYNKFFRKRMEIIYDKQKNFINYYKAQREENPELIIDDIVKTYLSNEYSKEIDELNTYIEESLNKITQNSGNDVRNFEEFKNGESFNLYEQELVERWNLAAASDILRISALKEIGGMYLDVDMLPGIQPDLFESIEKPSSVTVDFWEMTKLEAIMKYKEYIPEYTSEHFDMLDEEVQSSFESVLASKSDKSEIFSSLGDMEASPLEVKIAFNSKGIINQGLISVKDSYCSNLIVKQIENRYKILNNSLNPAISEDNDFNTTTNTFIDSIMAEANADNGRFMMELGKYLRVGFFPDVKTTINLSGPEAYAAAYQDLLMFKEGSMNIHLIEADLRNFEISKTNISQSTEQEMASLWSFDDARAKAQFEEYKRNYFEGSLGEDDNLDFSQNIVVDKEYLLEKISSLARSSERGYIHYIVQLQGDKISYEAACNLFAKTPYDSVLFQKNIEDSEIAYYYNPGDGEIQEIDKYKIPSIISDRPKIKLTFIGHGKDEFNTDIFAGFDVDSLSTEIEAAIDLAKEDISPKSIEINLLGCNMFSYSINVEETYPGKLLLKVKDKISELMPSISQDSIIVSANQYEVRINSEGRRELLDHSGEWINKEESIIKDISSKEYISFNPKENKITVKSKNLPELSTLLQEIRNNSNSSDIELEEKVMLTECEINVISNIDTQIVEERIEEAKNLTSDSINYIKDEFKLIESISDALCDLKQQNELEDSHFISFEGISETDEGFSIRFINKETGESIFVETEKTIFSEYANHITEEISKIKGTIFDTVNGKLVKKVNLDTTHEVNTLNAAFFIQSLIEYNSSKESLSNLSVAMKVQVYAQLFSTGLNTITDAAKVVELVSTALDETIDLLPTLSEGLPIIATIIDGVSLGAAIKELSETSDPLLRQEIEAKIGIMAVNLTTATTAIITSSLGVASGFSILLVPLAGISAGIPSLVNNELVLRDKATKVVDYFKHVSLVETEGVFTLLDDKIMMPQDDLVISEIDFNNNSIVLGKCEIWRMEGGSGHTVTDDIDHFFSAPSITYREPHLSIYDVLEVQKEELDLSKDLMVLPNAPNRVFAWETGWTPGLRSLENDGTKLLDRIRDNYEGEFYWRYFAFIADALITTLKPRYEDTNIRINLDSNTRSFIVPIITTEYIREKLSYSFYGSGGTYALSLSQYNMGINIELSESDVWIIDVDNVVRDVTIESDKIKKGDLIEGILSTLSIEENKIILNSHEINFSGEVNGSNGFVSLTFSILEGINAIIEVDLLSKSYKLLISGELKILMLNSNHIQQKIDYIGFNSELQKNIPYSFVDSEGKENGFINGSTKEGLFVSELPDVVLISKVYMDDSKPSFGYYSNNLKDVKVITKDNVNILTGYYLKDDIKISLSLTLQDEKTIKLNSVHLDESGVAEILKFMNRKGNTNTSDSLMSFLESMNIKSIFVNFLQSNIKFILDANFIISGTTSIGQFEFICDENDNIQPYFIKFNTLETNYTLYVGNRQNMIVEPNYDLDDSGDISSTVINFSQKYLYGIDSCVNKVVISPNIYTDEINITPVYETNNTYPEVIVLDANYINEKINVNINDLSIRYVWSNDGNDFILMSTSEENKVSQVKIRFVNVFKDKTLANKLSFNFSDKQDVPVSEIILSFTPSYYEDGLIGYDLGLVSLYNEKFYINNFGMMVSGLIYINDSLYYFKPPVNNLITGFVTVGDDKYYFNPINGGAASIGETIIDDKNYYFNQSGVLQTGVFSTEDGFKYFAPANTLDENLEGEAIDFTGKLIIDENIYYFDDNYRGAVEWKELDGEMHYFSPETGKAFKGLNQIGDYKYYFNSDGVMQKGFVSINDNKHYFDDSGVMKVGYTEIDGKHFYFAENGEMQIGVFNTEDGFKYFAHHNEDLGNEEGEEISYSGILNFNNKIYYFDDSFTAVVGWKDLEDGSKYYFDEDTAEAYIGLSLINDGQYYFNDDGIMQVGFVTINDKVFYFSDSGIIESGVQNIDDNYFYIDDNGIVQIGVFDTSDGYKYFAPANTVNDNIYGQAVEYSGLVRVGEDVYYFGETYTIETGWIYDMENESDKYYFNPETKKACKGINLIDDIKYYFDEKGIMRTGLISFENNNYYFNENGEMQFGYINIEDKMFYFGEDGVMQIGVFNTPDGFKYFAHQNTLDENFEGESINYTGWLDLDEKRYYFTDEYIAATGSVIIDGEEYYFDPDTAQLVISE

SEQ ID NO: 826 - protein, 2366 aa, Clostridium difficile
MSLVNRKQLEKMANVKFRTQEDEYVAILDALEEYHNMSENTVVEKYLKLKDINSLTDAYIDTYKKSGRNKALKKFKEYLTTEVIELKNSNLTPVEKNLHFVWIGGQISDTAINYINQWKDVNSDYNTNVFYDSNAFLINTLKKTIVEATTNDTLESFSENLNDPRFDHNNFYRKRMEMIYDKQKNFINYYKAQREENPELIIDDIVKTYLSNEYSKEIDELNAYIEESLNKITQNSGNDVRNFEEFKNGESFKLYEQELVERWNLAAASDILRISALKEIGGVYLDVDMLPGIQPDLFESIEKPSSVTVDFWEMTKLEAIMKYKEYIPGYTSEHFDMLDEEVQSSFESALASKSDKSEIFSSLGDMEASPLEVKIAFNSKGIINQGLISVKDSYCSNLIVKQIENRYKILNNSLNPAISEDNDFNTTTNTFIDSIMAEANADNGRFMMELGKYLRVGFFPDVKTTINLSGPEAYAAAYQDLLMFKEDSMNIHLIEADLRNFEISKTNISQSTEQEMASLWSFDDARAKAQFEEYKRNYFEGALGEDDNLDFSQNTVVDKEYLLEKISSLARSSERGYIHYIVQLQGDKISYEAACNLFAKTPYDSILFQKNIEDSEIAYYYNPGDDEIQEIDKYRIPSIISDRPKIKLTFIGHGKDEFNTDIFAGLDVDSLSTEIETVIDLAKEDISPKAIEINLLGCNMFSYSINIEETYPGKLLLKVKDKISELMPSISQDSIIVSANQYEVRINSEGRRELLDHSGEWINKEESIIKDISSKEYISFNSKENKIIVKSKNLPELSTLLQEIRNNSNSSDIELEEKVMLAECEINVISNIDTQIVEERIEEAKNLTSDSINYIKNEFKLIESISDALCDLKQQNELEDSHFISFEDISETDEGFSIRFINKETGESIFVETEKTIFSEYANHITEEISKVKDTIFDTVNGKLVKKVNLDTTHEVNTLNAAFFIQSLIEYNSSKESLSNLSVAMKVQVYAQLFSTGLNTITDAAKVVELVSTALDETIDLLPTLSEGLPVIATIIDGVSLGSAIKELSETSDPLLRQEIEAKIGIMAVNLTAATTAIITSALGIASGFSILLVPLAGISAGIPSLVNNELILRDKATKVVDYFKHISLAETEGAFTLLDDKIIMPQDDLVISEIDFNNNSITLGKCEIWRMEGGSGHTVTDDIDHFFSSPSITYREPYLSIYDVLEVQKEELDLSKDLMVLPNAPNRVFAWETGWTPGLRSLENDGTKLLDRIRNHYEGEFYWRYFAFIADALITTLKPRYEDTNIRINLDSNTRSFVVPVITTEYIRENLSYSFYGSGGTYALSLSQYNMGINIELSESDVWIIDVDNVVRDVTIESDKIKKGDLIEGILSTLSIEDNKIILNSHELNFSGDVNGSNGFVSLTFSILEGINAIIEVDLLSKSYKLLLSGELKTLMSNSNYIQQKIDYIGFNSELQKNIPYSFVDAEGKKNGFINVSTKEGLFASELSDVVLISKVYMDNSKPSFGHYSDILKDVKVITKDDINILTGYYLKDDIKISLSFTLQDEHTIKLNGVHLDEKGVAEILTFMNKKVGTNTSDSLMSFLKSMNINNVFSHSLQDKVNLVLETNFIISGMTSIGQFEFICDENDNIQPYFIKFNALDTKYTLYLGNRQNMIVEPNYDLDDSGNISSTVINFSQKHLYGIDSFINKVIISPNLYTDEINITPVHETNNTYPEVIVLDANYISEKIKVNINDLSIRYIWSNDGNDFILMSTIGEDKASQVKIRFANVFKGNTLANKLSFNFSDKQDVSLSEIISAFTPSKYEDGFSSYKLGLISFYNEKFYINNFGMKVSGLIYINDSLYYFKPPVNNLITGFTTVGDDKYYFNPTNGGAASIGDTIIDDKNYYFNQIGVLQTGVFSTEDGFKYFAPANTLDENLEGEAIDFTGKLIIDENIYYFEDNYRGAVEWKELDGEMYYFSPETGKAFKGLNQIGDDKYYFNSDGIMQKGFVSINDKKHYFDDSGVMKVGYTEIDGKYFYFAENGEMQIGVFNTSDGFKYFAHYNEDLGNEEGEALSYSGILNFNNKIYYFDDSFTAVVGWRNLDDGSKYYFDENTAEAFIGFSLINDEQYYFNEDGIMQVGFVTINDRVFYFSDSGIIESGVQNIDDNYFYIDEKGIVQIGVFDTSDGYKYFAPPNTVNENIYGQAVEYSGLVKVNEDVYYFGETYLIETGWIYDMENESDKYYFDPETKKAYKGINVINDTKYYFDENGIMRTGLISFENNHYYFNEDGVMQSGYINIEDKMFYFSEDGIMQIGVFNTPDGFKYFAHQNTLDDNFEGESINYTGWLDFNEKRYYFTDEYIAATGSVTIDDEEYYFDPDTAELVLSE

SEQ ID NO: 827 - protein, 2367 aa, Clostridium difficile
MSLVNRKQLEKMANVRFRTQEDEYVAILDALEEYHNMSENTVVEKYLKLKDINSLTDIYIDTYKKSGRNKALKKFKEYLVTEVLELKNNNLTPVEKNLHFVWIGGQINDTAINYINQWKDVNSDYNVNVFYDSNAFLINTLKKTIVESATNDTLESFRENLNDPEFNHTAFFRKRMQIIYDKQQNFINYYKAQKEENPDLIIDDTVKSYLSDEYSKDIDELNAYIEESLNKIAENSGNDVRNFEEFKDGEVFNLYEQELVERWNLAAASDILRVAILKNIGGVYLDVDMLPGIHPDLFKNINKPDSVKTAVDWEEMQLEAIMKYKEYIPEYTSKHFDTLDEEVQSSFESVLASKSDKSEIFLPLGDIEVSPLEVKIAFAKGSIINQALISVKDSYCSDLLIKQIQNRYKILNDTLGPIISQGNDFNTTMNSFGESLGAISSEDNISFIAKIGSYLRVGFYPEANTTITLSGPTVYAGAYKDLLTFKEISLDTSILTSELRNFEFPKDNISQATEQEKNSLWQFNEERAKIQFEEYKRAYFEGALGEDDNLDFSQNIVTDKEYLLEKISSSTKSSERGYVHYIVQLQGDKISYEAACNLFAKNPYDSILFQKNIEDSEIAYYYNPADGEIQEIDKYRIPDRISDRPKIKLTFIGHGKDEFNTDIFAGLDVDSLSTEIETAIDLAKEDISSKSIEINLLGCNMFSYSINVEETYPGKLLLKVKDKISELMPSISQDSIIVSANQYEVRINSEGRRELLDHSGEWINKEESIIKDISSKEYISFNPKENKITVKSKNLPELSILLQEIRNNSNLSDIELEEKVMLAECEINVISNIDTQIVEERIEEAKNLTSDSINYIKNEFKLIESISDSLYDLKQQNELDDSHFISFEDISKTEDGFSIRFINKETGESIFVETEKEIFSEYANHIEREISNIKDTIFDTVNGKLVKKVNLDAIHEVNTLNAAFFIQSLIGYSSSKESLSNLSVAMKVQVYAQLFSTGLNTITDAAKVVELVSTALDETIDLLPTLSEGLPVIATIIDGVSLGAAIKELSETSDPLLRQEIEAKIGIMAVNLTAATTAIITSSLGIASGFSILLVPLAGISAGIPSLVNNELVLRDKATKVVDYFKHISLVETEGAFTLLDDKIMIPQDDLVISEIDFNNNSIVLGKCEIWRMEGGSGHTVTNDIDHFFSSPTITYIKPHLSIYDVLEVQKEELDLSKDLMVLPNAPNRVFAWETGWTPGLRSLENEGTKLLDRIRDHYKGEFYWRYFAFIADALITTLKPRYEDTNIRINLDSNNRSFIVPIITTEHIREKLSYSFHGSGGTYALSLSQYNMGINIELSESDVWIIDVDNVVRDVTIDSDKIKKGDLIEGILSTLSIEDNKIILNHHEINFSGDVNGSNGFISLTFSILEGINAIIEVDLLSKSYKLLISGELKILMLNSNHIQQKIDYIGFNSELQKNIPYSFVDSEGKENGFINGSTKEGLFVSELPDVVLISKVYMDDSKPSFGYYSNNLKDVKVITKDNVNILTGYYLKDDIKISLSFTLQDEKTIKLNGVHLDESGVAEILKFMNKKGSTNTSDSLMSFLESVNIKSIFVNFLQSKINFILDANFIISGTTSIGQFEFICDENDNIQPYFIKFNTLETTYTLYVGNRQNMIVEPNYDLDDSGDISSTVINFSQKYLYGIDSCVNKVVISPNIYTDEINITPVYETNNNYPEVIVLDANYINEKINVNINDLSIRYVWSNDGNDFILMSTSEENKVSQVKIRFVNVFKDKTLANKLSFNFSDKQDVPVSEIISAFTPSYYEDGLIGYDLGLVSLYNEKFYINNFGMMVSGLIYINDSLYYFKPPVNNLITGFVTVGDDKYYFNPTNGGAASIGETIIDDKNYYFNQSGILQTGVFSTEDGLKYFAPANTLDENLEGEAIDFTGKLIIDENIYYFEDNYRGAVEWKELDGEMYYFSPETGKAFKGLNQIGDDKYYFNSDGIMQKGFVSINDKKYYFDDSGVMKVGYIEIDGKYFYFAENGEMQIGVFNTSDGFKYFAHHNEDLGNEEGEAISYSGILNFNNKIYYFDYSFTAVVGWKDLEDGSKYYFDEDTAEAYVGLSLINDGQYYFNDDGIMQVGFVTINNKVFYFSDSGIIESGVQNIDDNYFYIDEKGIVQIGVFDTSDGYKYFAPANTVNDNIYGQAVDYSGLVRVGEDIYYFGETYTIETGWIYDMENESDKYYFNPETKKACKGINLIDDIKYYFDENGIMRTGLISFENNDYYFNENGEMHFGYINIEDKMFYFGEDGVMQIGVFNTPDGFKYFAHQNTLDENFEGESINYTGWLDLEGKRYYFTDEYIAATGTVTIDGEEYYFDPDTAELVVSE

SEQ ID NO: 828 - protein, 2367 aa, Clostridium difficile
MSLVNRKQLEKMANVRFRVQEDEYVAILDALEEYHNMSENTVVEKYLKLKDINSLTDTYIDTYKKSGRNKALKKFKEYLVTEILELKNSNLTPVEKNLHFIWIGGQINDTAINYINQWKDVNSDYNVNVFYDSNAFLINTLKKTIIESASNDTLESFRENLNDPEFNHTAFFRKRMQIIYDKQQNFINYYKVQKEENPDLIIDDIVKTYLSNEYSKDIDELNAYIEESLNKVTENSGNDVRNFEEFKTGEVFNLYEQELVERWNLAGASDILRVAILKNIGGVYLDVDMLPGIHPDLFKDINKPDSVKTAVDWEEMQLEAIMKYKEYIPEYTSKHFDTLDEEVQSSFESVLASKSDKSEIFLPLGDIEVSPLEVKIAFAKGSIINQALISAKDSYCSDLLIKQIQNRYKILNDTLGPIISQGNDFNTTMNNFGESLGAIANEENISFIAKIGSYLRVGFYPEANTTITLSGPTIYAGAYKDLLTFKEMSIDTSILSSELRNFEFPKVNISQATEQEKNSLWQFNEERAKIQFEEYKKNYFEGALGEDDNLDFSQNTVTDKEYLLEKISSSTKSSERGYVHYIVQLQGDKISYEAACNLFAKTPYDSVLFQKNIEDSEIAYYYNPGDGEIQEIDKYKIPSIISDRPKIKLTFIGHGKDEFNTDIFAGLDVDSLSTEIETAIGLAKEDISPKSIEINLLGCNMFSYSVNVEETYPGKLLLRVKDKVSELMPSISQDSIIVSANQYEVRINSEGRRELLDHSGEWINKEESIIKDISSKEYISFNPKENKIIVKSKNLPELSTLLQEIRNNSNSSDIELEEKVMLAECEINVISNIDTQVVEERIEEAKSLTSDSINYIKNEFKLIESISDALYDLKQQNELEESHFISFEDISETDEGFSIRFIDKETGESIFVETEKAIFSEYANHITEEISKLKDTIFDTVNGKLVKKVNLDATHEVNTLNAAFFIQSLIEYNSSKESLSNLSVAMKVQVYAQLFSTGLNTITDAAKVVELVSTALDETIDLLPTLSEGLPVIATIIDGVSLGAAIKELSETSDPLLRQEIEAKIGIMAVNLTAATTAIITSSLGIASGFSILLVPLAGISAGIPSLVNNELILRDKATKVVDYFSHISLAESEGAFTSLDDKIMMPQDDLVISEIDFNNNSITLGKCEIWRMEGGSGHTVTNDIDHFFSSPSITYREPHLSIYDVLEVKKEELDLSKDLMVLPNAPNRVFGWETGWTPGLRSLENDGTKLLDRIRDQYEGQFYWRFLAFIADALITTLKPRYEDTNVRISLDSNTRSFIVPVITTEYIREKLSYSFYGSGGTYALSLSQYNMNINIELNENDTWVIDVDNVVRDVTIESDKIKKGDLIENILSKLSIEDNKIILDNHEINFSGTLNGGNGFVSLTFSILEGINAVIEVDLLSKSYKVLISGELKTLMANSNSVQQKIDYIGLNSELQKNIPYSFMDDKGKENGFINCSTKEGLFVSELSDVVLISKVYMDNSKPLFGYCSNDLKDVKVITKDDVIILTGYYLKDDIKISLSFTIQDENTIKLNGVYLDENGVAEILKFMNKKGSTNTSDSLMSFLESMNIKSIFINSLQSNTKLILDTNFIISGATSIGQFEFICDKDNNIQPYFIKFNTLETKYTLYVGNRQNMIVEPNYDLDDSGDISSTVINFSQKYLYGIDSCVNKVIISPNIYTDEINITPVYEANNTYPEVIVLDTNYISEKINININDLSIRYVWSNDESDFILMSTDEENKVSQVKIRFTNVFKGNTISDKISFNFSDKQDVSINKIISTFTPSYYVEGLLNYDLGLISLYNEKFYINNFGMMVSGLVYINDSLYYFKPPIKNLITGFTTIGDDKYYFNPDNGGAASVGETIIDGKNYYFSQNGVLQTGVFSTEDGFKYFAPADTLDENLEGEAIDFTGKLTIDENVYYFGDNYRAAIEWQTLDDEVYYFSTDTGRAFKGLNQIGDDKFYFNSDGIMQKGFVNINDKTFYFDDSGVMKSGYTEIDGKYFYFAENGEMQIGVFNTADGFKYFAHHDEDLGNEEGEALSYSGILNFNNKIYYFDDSFTAVVGWKDLEDGSKYYFDEDTAEAYIGLSLINDGQYYFNDDGIMQVGFVAINDKVFYFSDSGIIESGVQNIDDNYFYIDEKGIVQIGVFDTSDGYKYFAPANTVNDNIYGQAVEYSGLVRVGEDVYYFGETYTIETGWIYDMENESDKYYFDPETKKACKGINTIHDIKYYFDETGIMRTGLITFENNHYYFNEDGEMQYGYLNIEDKMFYFSEDGIMQIGVFNTPDGFKYFAHQNTLDENFEGESINYTGWLDLDEKRYYFTDEYIAATGSVIIDGEEYYFDPDTAQLVISE

SEQ ID NO: 829 - protein, 2367 aa, Clostridium difficile
MSLVNRKQLEKMANVRFRVQEDEYVAILDALEEYHNMSENTVVEKYLKLKDINSLTDTYIDTYKKSGRNKALKKFKEYLVTEILELKNSNLTPVEKNLHFIWIGGQINDTAINYINQWKDVNSDYNVNVFYDSNAFLINTLKKTIIESASNDTLESFRENLNDPEFNHTAFFRKRMQIIYDKQQNFINYYKAQKEENPDLIIDDIVKTYLSNEYSKDIDELNAYIEESLNKVTENSGNDVRNFEEFKTGEVFNLYEQELVERWNLAGASDILRVAILKNIGGVYLDVDMLPGIHPDLFKDINKPDSVKTAVDWEEMQLEAIMKYKEYIPEYTSKHFDTLDEEVQSSFESVLASKSDKSEIFLPLGDIEVSPLEVKVAFAKGSIINQALISAKDSYCSDLLIKQIQNRYKILNDTLGPIISQGNDFNTTMNNFGESLGAIANEENISFIAKIGSYLRVGFYPEANTTITLSGPTIYAGAYKDLLTFKEMSIDTSILSSELRNFEFPKVNISQATEQEKNSLWQFNEERAKIQFEEYKKNYFEGALGEDDNLDFSQNTVTDKEYLLEKISSSTKSSERGYVHYIVQLQGDKISYEAACNLFAKNPYDSILFQKNIEDSEVAYYYNPTDSEIQEIDKYRIPDRISDRPKIKLTLIGHGKAEFNTDIFAGLDVDSLSSEIETIIDLAKADISPKSIEINLLGCNMFSYSVNVEETYPGKLLLRVKDKVSELMPSISQDSIIVSANQYEVRINSEGRRELLDHSGEWINKEESIIKDISSKEYISFNPKENKIIVKSKNLPELSTLLQEIRNNSNSSDIELEEKVMLAECEINVISNIETQVVEERIEEAKSLTSDSINYIKNEFKLIESISDALYDLKQQNELEESHFISFEDISKTDEGFSIRFIDKETGESIFVETEKAIFSEYANHITEEISKLKDTIFDTVNGKLVKKVTLDATHEVNTLNAAFFIQSLIGYNSSKESLSNLSVAMKVQVYAQLFSTGLNTITDAAKVVELVSTALDETIDLLPTLSEGLPVIATIIDGVSLGASIKELSETSDPLLRQEIEAKIGIMAVNLTAATTAIITSSLGIASGFSILLVPLAGISAGIPSLVNNELILRAEAKNVVDYFGHISLAESEGAFTLLDDKIMMPQDDLVISEIDFNNNSITLGKCEIWRMEGGSGHTVTDDIDHFFSAPSTTYREPYLSIYDVLDVKKEELDLSKDLMVLPNAPDRIFGWERGWTPGLRSLENDGTKLLDRIRDHYEGQFYWRFFAFIADSVITKLKPRYEDTNIRISLDSNTRSFIVPVITTEYIREKLSYSFYGSGGTYALSLSQYNMNINIELNENDTWVIDVDNVVRDVTIESDKIKKGDLIENILSKLSIEDNKIILDNHEINFSGTLNGGNGFVSLTFSILEGINAVIEVDLLSKSYKVLISGELKTLMANSNSVQQKIDYIGLNSELQKNIPYSFMDDEGKENGFINCFTKEGLFVSELSDVVLIIKVYMDNSKPPFGYYSNDLKDVKVITKDDVIILTGYYLKDDIKISLSFTIQDKNTIKLNGVYLDENGVAEILKFMNKKGSTNTSDSLMSFLESMNIKSIFIKSLKSNAKLILDTNFIISGTTSIGQFEFICDKDNNIQPYFIKFNTLETKYTLYVGNRQNMIVEPNYNLDDSGDISSTVINFSQKYLYGIDSCVNKVIISPNIYTDEINITPVHEANNTYPEVIVLDTNYISEKINININDLSIRYVWSNDGSDFILMSTDEENKVSQVKIRFTNVFKGNTISDKISFNFSDKQDISINKIISTFTPSYYVEGLLNYDLGLISLYNEKFYINNLGMMVSGLVYINDSLYYFKPPIKNLITGFTTIGDDKYYFNPDNGGAASVGETIIDGKNYYFSQNGVLQTGVFSTEDGFKYFAPADTLDENLEGEAIDFTGKLIIDENVYYFGDNYRAAIEWQTLDDEVYYFSTDTGRAFKGLNQIGDDKFYFNSDGIMQKGFVNINDKTFYFDDSGVMKSGYTEIDGKYFYFAENGEMQIGVFNTADGFKYFAHHDEDLGNEEGEALSYSGILNFNNKIYYFDDSFTAVVGWKDLEDGSKYYFDENTAEASIGISIINDGKYYFNDSGIMQIGFVTINNEVFYFSDSGIVESGMQNIDDNYFYISENGLVQIGVFDTSDGYKYFAPANTVNDNIYGQAVEYSGLVRVNEDVYSFGESYTIETGWIYDSENESDKYYFDPETKKAYKGINVIDDIKYYFDENGIMRTGLITFEDNHYYFNEDGEMQYGYLNIEDKMFYFSEDGIMQIGVFNTPDGFKYFAHQNTLDENFEGESINYTGWLDLDEKRYYFTDEYIAATGSVIIDGEEYYFDPDTAQLVISE

SEQ ID NO: 830 - protein, 2367 aa, Clostridium difficile
MSLVNRKQLEKMANVRFRVQEDEYVAILDALEEYHNMSENTVVEKYLKLKDINSLTDTYIDTYKKSGRNKALKKFKEYLVTEILELKNSNLTPVEKNLHFIWIGGQINDTAINYINQWKDVNSDYNVNVFYDSNAFLINTLKKTIIESASNDTLESFRENLNDPEFNHTAFFRKRMQIIYDKQQNFINYYKVQKEENPDLIIDDIVKTYLSNEYSKDIDELNAYIEESLNKVTENSGNDVRDFEEFKTGEVFNLYEQELVERWNLAGASDILRVAILKNIGGVYLDVDMLPGIHPDLFKDINKPDSVKTAVDWEEMQLEAIMKYKEYIPEYTSKHFDTLDEEVQSSFESVLASKSDKSEIFLPLGDIEVSPLEVKIAFAKGSIINQALISAKDSYCSDLLIKQIQNRYKILNDTLGPIISQGNDFNTTMNNFGESLGAIANEENISFIAKIGSYLRVGFYPEANTTITLSGPTIYAGAYKDLLTFKEMSIDTSILSSELRNFEFPKVNISQATEQEKNSLWQFNEERAKIQFEEYKKNYFEGALGEDDNLDFSQNTVTDKEYLLEKISSSTKSSERGYVHYIVQLQGDKISYEAACNLFAKNPYDSILFQKNIEDSEVAYYYNPTDSEIQEIDKYRIPDRISDRPKIKLTLIGHGKAEFNTDIFAGLDVDSLSSEIETIIDLAKADISPKSIEINLLGCNMFSYSVNVEETYPGKLLLRVKDKISELMPSISQDSIIVSANQYEVRINSEGRRELLDHSGEWINKEESIIKDISSKEYISFNPKENKIIVKSKNLPELSTLLQEIRNNSNSSDIELEEKVMLAECEINVISNIDTQVVEERIEEAKSLTSDSINYIKNEFKLIESISDALYDLKQQNELEESHFISFEDISETDEGFSIRFIDKETGESIFVETEKAIFSEYANHITEEISKLKDTIFDTVNGKLVKKVNLDATHEVNTLNAAFFIQSLIEYNSSKESLSNLSVAMKVQVYAQLFSTGLNTITDAAKVVELVSTALDETIDLLPTLSEGLPVIATIIDGVSLGAAIKELSETSDPLLRQEIEAKIGIMAVNLTAATTAIITSSLGIASGFSILLVPLAGISAGIPSLVNNELILRDKATKVVDYFSHISLAESEGAFTSLDDKIMMPQDDLVISEIDFNNNSITLGKCEIWRMEGGSGHTVTNDIDHFFSSPSITYREPHLSIYDVLEVKKEELDLSKDLMVLPNAPNRVFGWETGWTPGLRSLENDGTKLLDRIRDQYEGQFYWRFLAFIADALITTLKPRYEDTNVRINLDSNTRSFIVPIITTEYIREKLSYSFYGSGGTYALSLSQYNMNINIELNENDTWVIDVDNVVRDVTIESDKIKKGDLIENILSKLSIEDNKIILDNHEINFSGTLNGGNGFVSLTFSILEGINAVIEVDLLSKSYKVLISGELKTLMANSNSVQQKIDYIGLNSELQKNIPYSFMDDKGKENGFINCSTKEGLFVSELSDVVLISKVYMDNSKPLFGYCSNDLKDVKVITKDDVIILTGYYLKDDIKISLSFTIQDENTIKLNGVYLDENGVAEILKFMNKKGSTNTSDSLMSFLESMNIKSIFINSLQSNTKLILDTNFIISGTTSIGQFEFICDKDNNIQPYFIKFNTLETKYTLYVGNRQNMIVEPNYDLDDSGDISSTVINFSQKYLYGIDSCVNKVIISPNIYTDEINITPIYEANNTYPEVIVLDTNYISEKINININDLSIRYVWSNDGSDFILMSTDEENKVSQVKIRFTNVFKGNTISDKISFNFSDKQDVSINKIISTFTPSYYVEALLNYDLGLISLYNEKFYINNFGMMVSGLVYINDSLYYFKPPIKNLITGFTTIGDDKYYFNPDNGGAASVGETIIDGKNYYFSQNGVLQTGVFSTEDGFKYFAPADTLDENLEGEAIDFTGKLTIDENVYYFGDNYRAAIEWQTLDDEVYYFSTDTGRAFKGLNQIGDDKFYFNSDGIMQKGFVNINDKTFYFDDSGVMKSGYTEIDGKYFYFAENGEMQIGVFNTADGFKYFAHHDEDLGNEEGEALSYSGILNFNNKIYYFDDSFTAVVGWKDLEDGSKYYFDEDTAEAYIGLSLINDGQYYFNDDGIMQVGFVAINDKVFYFSDSGIIESGVQNIDDNYFYIDEKGIVQIGVFDTSDGYKYFAPANTVNDNIYGQAVEYSGLVRVGEDVYYFGETYTIETGWIYDMENESDKYYFDPETKKACKGINTIHDIKYYFDETGIMRTGLITFENNHYYFNEDGEMQYGYLNIEDKMFYFSEDGIMQIGVFNTPDGFKYFAHQNTLDENFEGESINYTGWLDLDEKRYYFTDEYIAATGSVIIDGEEYYFDPDTAQLVISE

SEQ ID NO: 831 - protein, 2367 aa, Clostridium difficile
MSLVNRKQLEKMANVRFRVQEDEYVAILDALEEYHNMSENTVVEKYLKLKDINSLTDTYIDTYKKSGRNKALKKFKEYLVTEILELKNSNLTPVEKNLHFIWIGGQINDTAINYINQWKDVNSDYNVNVFYDSNAFLINTLKKTIIESASNDTLESFRENLNDPEFNHTAFFRKRMQIIYDKQQNFINYYKVQKEENPDLIIDDIVKTYLSNEYSKDIDELNAYIEESLNKVTENSGNDVRNFEEFKTGEVFNLYEQELVERWNLAGASDILRVAILKNIGGVYLDVDMLPGIHPDLFKDINKPDSVKTAVDWEEMQLEAIMKYKEYIPEYTSKHFDTLDEEVQSSFESVLASKSDKSEIFLPLGDIEVSPLEVKIAFAKGSIINQALISAKDSYCSDLLIKQIQNRYKILNDTLGPIISQGNDFNTTMNNFGESLGAIANEENISFIAKIGSYLRVGFYPEANTTITLSGPTIYAGAYKDLLTFKEMSIDTSILSSELRNFEFPKVNISQATEQEKNSLWQFNEERAKIQFEEYKKNYFEGALGEDDNLDFSQNTVTDKEYLLEKISSSTKSSERGYVHYIVQLQGDKISYEAACNLFAKNPYDSILFQKNIEDSEVAYYYNPTDSEIQEIDKYRIPDRISDRPKIKLTLIGHGKAEFNTDIFAGLDVDSLSSEIETIIDLAKADISPKSIEINLLGCNMFSYSVNVEETYPGKLLLRVKDKISELMPSISQDSIIVSANQYEVRINSEGRRELLDHSGEWINKEESIIKDISSKEYISFNPKENKIIVKSKNLPELSTLLQEIRNNSNSSDIELEEKVMLAECEINVISNIDTQVVEERIEEAKSLTSDSINYIKNEFKLIESISDALYDLKQQNELEESHFISFEDISETDEGFSIRFIDKETGESIFVETEKAIFSEYANHITEEISKLKDTIFDTVNGKLVKKVNLDATHEVNTLNAAFFIQSLIEYNSSKESLSNLSVAMKVQVYAQLFSTGLNTITDAAKVVELVSTALDETIDLLPTLSEGLPVIATIIDGVSLGAAIKELSETSDPLLRQEIEAKIGIMAVNLTAATTAIITSSLGIASGFSILLVPLAGISAGIPSLVNNELILRDKATKVVDYFSHISLAESEGAFTSLDDKIMMPQDDLVISEIDFNNNSITLGKCEIWRMEGGSGHTVTNDIDHFFSSPSITYREPHLSIYDVLEVKKEELDLSKDLMVLPNAPNRVFGWETGWTPGLRSLENDGTKLLDRIRDQYEGQFYWRFLAFIADALITTLKPRYEDTNVRINLDSNTRSFIVPIITTEYIREKLSYSFYGSGGTYALSLSQYNMNINIELNENDTWVIDVDNVVRDVTIESDKIKKGDLIENILSKLSIEDNKIILDNHEINFSGTLNGGNGFVSLTFSILEGINAVIEVDLLSKSYKVLISGELKTLMANSNSVQQKIDYIGLNSELQKNIPYSFMDDKGKENGFINCSTKEGLFVSELSDVVLISKVYMDDSKPSFGYYSNNLKDVKVITKDNVNILTGYYLKDDIKISLSLTLQDEKTIKLNSVHLDESGVAEILKFMNRKGSTNTSDSLMSFLESMNIKSIFVNFLQSNIKFILDANFIISGTTSIGQFEFICDKDNNIQPYFIKFNTLETKYTLYVGNRQNMIVEPNYDLDDSGDISSTVINFSQKYLYGIDSCVNKVIISPNIYTDEINITPIYEANNTYPEVIVLDTNYISEKINININDLSIRYVWSNDGSDFILMSTDEENKVSQVKIRFTNVFKGNTISDKISFNFSDKQDVSINKIISTFTPSYYVEGLLNYDLGLISLYNEKFYINNFGMMVSGLVYINDSLYYFKPPIKNLITGFTTIGDDKYYFNPDNGGAASVGETIIDGKNYYFSQNGVLQTGVFSTEDGFKYFAPADTLDENLEGEAIDFTGKLTIDENVYYFGDNYRAAIEWQTLDDEVYYFSTDTGRAFKGLNQIGDDKFYFNSDGIMQKGFVNINDKTFYFDDSGVMKSGYTEIDGKYFYFAENGEMQIGVFNTADGFKYFAHHDEDLGNEEGEALSYSGILNFNNKIYYFDDSFTAVVGWKDLEDGSKYYFDEDTAEAYIGISIINDGKYYFNDSGIMQIGFVTINNEVFYFSDSGIVESGMQNIDDNYFYIDENGLVQIGVFDTSDGYKYFAPANTVNDNIYGQAVEYSGLVRVGEDVYYFGETYTIETGWIYDMENESDKYYFDPETKKAYKGINVIDDIKYYFDENGIMRTGLITFEDNHYYFNEDGIMQYGYLNIEDKTFYFSEDGIMQIGVFNTPDGFKYFAHQNTLDENFEGESINYTGWLDLDEKRYYFTDEYIAATGSVIIDGEEYYFDPDTAQLVISE

SEQ ID NO: 832 - protein, 2367 aa, Clostridium difficile
MSLVNRKQLEKMANVRFRTQEDEYVAILDALEEYHNMSENTVVEKYLKLKDINSLTDIYIDTYKKSGRNKALKKFKEYLVTEVLELKNNNLTPVEKNLHFVWIGGQINDTAINYINQWKDVNSDYNVNVFYDSNAFLINTLKKTIVESATNDTLESFRENLNDPEFNHTAFFRKRMQIIYDKQQNFINYYKAQKEENPDLIIDDTVKSYLSDEYSKDIDELNAYIEESLNKIAENSGNDVRNFEEFKDGEVFNLYEQELVERWNLAAASDILRVAILKNIGGVYLDVDMLPGIHPDLFKNINKPDSVKTAVDWEEMKLEAIMKYKEYIPEYTSKHFDTLDEEVQSSFESVLASKSDKSEIFLPLGDIEVSPLEVKIAFAKGSIINQALISVKDSYCSDLLIKQIQNRYKILNDTLGPIISQGNDFNTTMNSFGESLGAISSEDNISFIAKIGSYLRVGFYPEANTTITLSGPTVYAGAYKDLLTFKEISLDTSILTSELRNFEFPKDNISQATEQEKNSLWQFNEERAKIQFEEYKRAYFEGALGEDDNLDFSQNTVTDKEYLLEKISSSTKSSERGYVHYIVQLQGDKISYEAACNLFAKNPYDSILFQKNIEDSEIAYYYNPADGEIQEIDKYRIPDRISDRPKIKLTFIGHGKDEFNTDIFAGLDVDSLSTEIETAIDLAKEDISSKSIEINLLGCNMFSYSINVEETYPGKLLLKVKDKISELMPSISQDSIIVSANQYEVRINSEGRRELLDHSGEWINKEESIIKDISSKEYISFNPKENKITVKSKNLPELSTLLQEIRNNSNLSDIELEEKVMLAECEINVISNIDTQIVEERIEEAKNLTSDSINYIKNEFKLIESISDSLYDLKQQNELDDSHFISFEDISKTEDGFSIRFINKETGESIFVETEKEIFSEYANHIEREISNIKDTIFDTVNGKLVKKVNLDAIHEVNTLNAAFFIQSLIGYSSSKESLSNLSVAMKVQVYAQLFSTGLNTITDAAKVVELVSTALDETIDLLPTLSEGLPVIATIIDGVSLGAAIKELSETSDPLLRQEIEAKIGIMAVNLTAATTAIITSSLGIASGFSILLVPLAGISAGIPSLVNNELVLRDKATKVVDYFKHISLVETEGAFTLLDDKIMIPQDDLVISEIDFNNNSIVLGKCEIWRMEGGSGHTVTNDIDHFFSSPTITYIKPHLSIYDVLEVQKEELDLSKDLMVLPNAPNRVFAWETGWTPGLRSLENEGTKLLDRIRDHYKGEFYWRYFAFIADALITTLKPRYEDTNIRINLDSNNRSFIVPIITTEHIREKLSYSFHGSGGTYALSLSQYNMGINIELSESDVWIIDVDNVVRDVTIDSDKIKKGDLIEGILSTLSIEDNKIILNHHEINFSGDVNGSNGFISLTFSILEGINAIIEVDLLSKSYKLLISGELKILMLNSNHIQQKIDYIGFNSELQKNIPYSFVDSEGKENGFINGSTKEGLFVSELPDVVLISKVYMDDSKPSFGYYSNNLKDVKVITKDNVNILTGYYLKDDIKISLSFTLQDEKTIKLNGVHLDESGVAEILKFMNKKGSTNTSDSLMSFLESVNIKSIFVNFLQSKINFILDANFIISGTTSIGQFEFICDENDNIQPYFIKFNTLETTYTLYVGNRQNMIVEPNYDLDDSGDISSTVINFSQKYLYGIDSCVNKVVISPNIYTDEINITPVYETNNNYPEVIVLDANYINEKINVNINDLSIRYVWSNDGNDFILMSTSEENKVSQVKIRFVNVFKDKTLANKLSFNFSDKQDVPVSEIISAFTPSYYEDGLIGYDLGLVSLYNEKFYINNFGMMVSGLIYINDSLYYFKPPVNNLITGFVTVGDDKYYFNPTNGGAASIGETIIDDKNYYFNQSGILQTGVFSTEDGLKYFAPANTLDENLEGEAIDFTGKLIIDENIYYFEDNYRGAVEWKELDGEMYYFSPETGKAFKGLNQIGDDKYYFNSDGIMKKGFVSINDKKYYFDDSGVMKVGYIEIDGKYFYFAENGEMQIGVFNTSDGFKYFAHHNEDLGNEEGEAISYSGILNFNNKIYYFDYSFTAVVGWKDLEDGSKYYFDEDTAEAYVGLSLINDGQYYFNDDGIMQVGFVTINNKVFYFSDSGIIESGVQNIDDNYFYIDEKGIVQIGVFDTSDGYKYFAPANTVNDNIYGQAVDYSGLVRVGEDIYYFGETYTIETGWIYDMENESDKYYFNPETKKACKGINLIDDIKYYFDENGIMRTGLISFENNDYYFNENGEMHFGYINIEDKMFYFGEDGVMQIGVFNTPDGFKYFAHQNTLDENFEGESINYTGWLDLEGKRYYFTDEYIAATGTVTIDGEEYYFDPDTAELVVSE

SEQ ID NO: 833 - protein, 2366 aa, Clostridium difficile
MSLVNRKQLEKMANVRFRTQEDEYVAILDALEEYHNMSENTVVEKYLKLKDINSLTDIYIDTYKKSGRNKALKKFKEYLVTEVLELKNNNLTPVEKNLHFVWIGGQINDTAINYINQWKDVNSDYNVNVFYDSNAFLINTLKKTVVESAINDTLESFRENLNDPRFDYNKFFRKRMEIIYDKQKNFINYYKAQREENPELIIDDIVKTYLSNEYSKEIDELNTYIEESLNKITQNSGNDVRNFEEFKNGESFNLYEQELVERWNLAAASDILRISALKEIGGMYLDVDMLPGIQPDLFESIEKPSSVTVDFWEMTKLEAIMKYKEYIPEYTSEHFDMLDEEVQSSFESVLASKSDKSEIFSSLGDMEASPLEVKIAFNSKGIINQGLISVKDSYCSNLIVKQIENRYKILNNSLNPAISEDNDFNTTTNTFIDSIMAEANADNGRFMMELGKYLRVGFFPDVKTTINLSGPEAYAAAYQDLLMFKEGSMNIHLIEADLRNFEISKTNISQSTEQEMASLWSFDDARAKAQFEEYKRNYFEGSLGEDDNLDFSQNIVVDKEYLLEKISSLARSSERGYIHYIVQLQGDKISYEAACNLFAKTPYDSVLFQKNIEDSEIAYYYNPGDGEIQEIDKYKIPSIISDRPKIKLTFIGHGKDEFNTDIFAGFDVDSLSTEIEAAIDLAKEDISPKSIEINLLGCNMFSYSINVEETYPGKLLLKVKDKISELMPSISQDSIIVSANQYEVRINSEGRRELLDHSGEWINKEESIIKDISSKEYISFNPKENKITVKSKNLPELSTLLQEIRNNSNSSDIELEEKVMLTECEINVISNIDTQIVEERIEEAKNLTSDSINYIKDEFKLIESISDALCDLKQQNELEDSHFISFEDISETDEGFSIRFINKETGESIFVETEKTIFSEYANHITEEISKIKGTIFDTVNGKLVKKVNLDTTHEVNTLNAAFFIQSLIEYNSSKESLSNLSVAMKVQVYAQLFSTGLNTITDAAKVVELVSTALDETIDLLPTLSEGLPIIATIIDGVSLGAAIKELSETSDPLLRQEIEAKIGIMAVNLTTATTAIITSSLGIASGFSILLVPLAGISAGIPSLVNNELVLRDKATKVVDYFKHVSLVETEGVFTLLDDKIMMPQDDLVISEIDFNNNSIVLGKCEIWRMEGGSGHTVTDDIDHFFSAPSITYREPHLSIYDVLEVQKEELDLSKDLMVLPNAPNRVFAWETGWTPGLRSLENDGTKLLDRIRDNYEGEFYWRYFAFIADALITTLKPRYEDTNIRINLDSNTRSFIVPIITTEYIREKLSYSFYGSGGTYALSLSQYNMGINIELSESDVWIIDVDNVVRDVTIESDKIKKGDLIEGILSTLSIEENKIILNSHEINFSGEVNGSNGFVSLTFSILEGINAIIEVDLLSKSYKLLISGELKILMLNSNHIQQKIDYIGFNSELQKNIPYSFVDSEGKENGFINGSTKEGLFVSELPDVVLISKVYMDDSKPSFGYYSNNLKDVKVITKDNVNILTGYYLKDDIKISISLTLQDEKTIKLNSVHLDESGVAEILKFMNRKGNTNTSDSLMSFLESMNIKSIFVNFLQSNIKFILDANFIISGTTSIGQFEFICDENDNIQPYFIKFNTLETNYTLYVGNRQNMIVEPNYDLDDSGDISSTVINFSQKYLYGIDSCVNKVVISPNIYTDEINITPVYETNNTYPEVIVLDANYINEKINVNINDLSIRYVWSNDGNDFILMSTSEENKVSQVKIRFVNIFKDKTLANKLSFNFSDKQDVPVSEIILSFTPSYYEDGLIGYDLGLVSLYNEKFYINNFGMMVSGLIYINDSLYYFKPPVNNLITGFVTVGDDKYYFNPINGGAASIGETIIDDKNYYFNQSGVLQTGVFSTEDGFKYFAPANTLDENLEGEAIDFTGKLIIDENIYYFDDNYRGAVEWKELDGEMHYFSPETGKAFKGLNQIGDDKYYFNSDGVMQKGFVSINDNKHYFDDSGVMKVGYTEIDGKHFYFAENGEMQIGVFNTEDGFKYFAHHNEDLGNEEGEEISYSGILNFNNKIYYFDDSFTAVVGWKDLEDGSKYYFDEDTAEAYIGLSLINDGQYYFNDDGIMQVGFVTINDKVFYFSDSGIIESGVQNIDDNYFYIDDNGIVQIGVFDTSDGYKYFAPANTVNDNIYGQAVEYSGLVRVGEDVYYFGETYTIETGWIYDMENESDKYYFNPETKKACKGINLIDDIKYYFDEKGIMRTGLISFENNNYYFNENGEMQFGYINIEDKMFYFGEDGVMQIGVFNTPDGFKYFAHQNTLDENFEGESINYTGWLDLDEKRYYFTDEYIAATGSVIIDGEEYYFDPDTAQLVISE

SEQ ID NO: 834 - protein, 2366 aa, Clostridium difficile
MSLVNRKQLEKMANVRFRTQEDEYVAILDALEEYHNMSENTVVEKYLKLKDINSLTDIYIDTYKKSGRNKALKKFKEYLVTEVLELKNNNLTPVEKNLHFVWIGGQINDTAINYINQWKDVNSDYNVNVFYDSNAFLINTLKKTVVESAINDTLESFRENLNDPRFDYNKFFRKRMEIIYDKQKNFINYYKAQREENPELIIDDIVKTYLSNEYSKEIDELNTYIEESLNKITQNSGNDVRNFEEFKNGESFNLYEQELVERWNLAAASDILRISALKEIGGMYLDVDMLPGIQPDLFESIEKPSSVTVDFWEMTKLEAIMKYKEYIPEYTSEHFDMLDEEVQSSFESVLASKSDKSEIFSSLGDMEASPLEVKIAFNSKGIINQGLISVKDSYCSNLIVKQIENRYKILNNSLNPAISEDNDFNTTTNTFIDSIMAEANADNGRFMMELGKYLRVGFFPDVKTTINLSGPEAYAAAYQDLLMFKEGSMNIHLIEADLRNFEIFKTNISQSTEQEMASLWSFDDARAKAQFEEYKRNYFEGSLGEDDNLDFSQNIVVDKEYLLEKISSLARSSERGYIHYIVQLQGDKISYEAACNLFAKTPYDSVLFQKNIEDSEIAYYYNPGDGEIQEIDKYKIPSIISDRPKIKLTFIGHGKDEFNTDIFAGFDVDSLSTEIEAAIDLAKEDISPKSIEINLLGCNMFSYSINVEETYPGKLLLKVKDKISELMPSISQDSIIVSANQYEVRINSEGRRELLDHSGEWINKEESIIKDISSKEYISFNPKENKITVKSKNLPELSTLLQEIRNNSNSSDIELEEKVMLTECEINVISNIDTQIVEERIEEAKNLTSDSINYIKDEFKLIESISDALCDLKQQNELEDSHFISFEDISETDEGFSIRFINKETGESIFVETEKTIFSEYANHITEEISKIKGTIFDTVNGKLVKKVNLDTTHEVNTLNAAFFIQSLIEYNSSKESLSNLSVAMKVQVYAQLFSTGLNTITDAAKVVELVSTALDETIDLLPTLSEGLPIIATIIDGVSLGAAIKELSETSDPLLRQEIEAKIGIMAVNLTTATTAIITSSLGIASGFSILLVPLAGISAGIPSLVNNELVLRDKATKVVDYFKHVSLVETEGVFTLLDDKIMMPQDDLVISEIDFNNNSIVLGKCEIWRMEGGSGHTVTDDIDHFFSAPSITYREPHLSIYDVLEVQKEELDLSKDLMVLPNAPNRVFAWETGWTPGLRSLENDGTKLLDRIRDNYEGEFYWRYFAFIADALITTLKPRYEDTNIRINLDSNTRSFIVPIITTEYIREKLSYSFYGSGGTYALSLSQYNMGINIELSESDVWIIDVDNVVRDVTIESDKIKKGDLIEGILSTLSIEENKIILNSHEINFSGEVNGSNGFVSLTFSILEGINAIIEVDLLSKSYKLLISGELKILMLNSNHIQQKIDYIGFNSELQKNIPYSFVDSEGKENGFINGSTKEGLFVSELPDVVLISKVYMDDSKPSFGYYSNNLKDVKVITKDNVNILTGYYLKDDIKISLSLTLQDEKTIKLNSVHLDESGVAEILKFMNRKGNTNTSDSLMSFLESMNIKSIFVNFLQSNIKFILDANFIISGTTSIGQFEFICDENDNIQPYFIKFNTLETNYTLYVGNRQNMIVEPNYDLDDSGDISSTVINFSQKYLYGIDSCVNKVVISPNIYTDEINITPVYETNNTYPEVIVLDANYINEKINVNINDLSIRYVWSNDGNDFILMSTSEENKVSQVKIRFVNVFKDKTLANKLSFNFSDKQDVPVSEIILSFTPSYYEDGLIGYDLGLVSLYNEKFYINNFGMMVSGLIYINDSLYYFKPPVNNLITGFVTVGDDKYYFNPINGGAASIGETIIDDKNYYFNQSGVLQTGVFSTEDGFKYFAPANTLDENLEGEAIDFTGKLIIDENIYYFDDNYRGAVEWKELDGEMHYFSPETGKAFKGLNQIGDYKYYFNSDGVMQKGFVSINDNKHYFDDSGVMKVGYTEIDGKHFYFAENGEMQIGVFNTEDGFKYFAHHNEDLGNEEGEEISYSGILNFNNKIYYFDDSFTAVVGWKDLEDGSKYYFGEDTAEAYIGLSLINDGQYYFNDDGIMQVGFVTINDKVFYFSDSGIIESGVQNIDDNYFYIDDNGIVQIGVFDTSDGYKYFAPANTVNDNIYGQAVEYSGLVRVGEDVYYFGETYTIETGWIYDMENESDKYYFNPETKKACKGINLIDDIKYYFDEKGIMRTGLISFENNNYYFNENGEMQFGYINIEDKMFYFGEDGVMQIGVFNTPDGFKYFAHQNTLDENFEGESINYTGWLDLDEKRYYFTDEYIAATGSVIIDGEEYYFDPDTAQLVISE

SEQ ID NO: 835 - protein, 2367 aa, Clostridium difficile
MSLVNRKQLEKMANVRFRVQEDEYVAILDALEEYHNMSENTVVEKYLKLKDINSLTDTYIDTYKKSGRNKALKKFKEYLVTEILELKNSNLTPVEKNLHFIWIGGQINDTAINYINQWKDVNSDYNVNVFYDSNAFLINTLKKTIIESASNDTLESFRENLNDPEFNHTAFFRKRMQIIYDKQQNFINYYKAQKEENPDLIIDDIVKTYLSNEYSKDIDELNAYIEESLNKVTENSGNDVRNFEEFKTGEVFNLYEQELVERWNLAGASDILRVAILKNIGGVYLDVDMLPGIHPDLFKDINKPDSVKTAVDWEEMQLEAIMKYKEYIPEYTSKHFDTLDEEVQSNFESVLASKSDKSEIFLPLGDIEVSPLEVKVAFAKGSIINQALISAKDSYCSDLLIKQIQNRYKILNDTLGPIISQGNDFNTTMNNFGESLGAIANEENISFIAKIGSYLRVGFYPEANTTITLSGPTIYAGAYKDLLTFKEMSIDTSILSSELRNFEFPKVNISQATEQEKNSLWQFNEERAKIQFEEYKKNYFEGALGEDDNLDFSQNTVTDKEYLLEKISSSTKSSERGYVHYIVQLQGDKISYEAACNLFAKNPYDSILFQKNIEDSEVAYYYNPTDSEIQEIDKYRIPDRISDRPKIKLTLIGHGKAEFNTDIFAGLDVDSLSSEIETIIDLAKADISPKSIEINLLGCNMFSYSVNVEETYPGKLLLRVKDKVSELMPSISQDSIIVSANQYEVRINSEGRRELLDHSGEWINKEESIIKDISSKEYISFNPKENKIIVKSKNLPELSTLLQEIRNNSNSSDIELEEKVMLAECEINVISNIETQVVEERIEEAKSLTSDSINYIKNEFKLIESISDALYDLKQQNELEESHFISFEDISKTDEGFSIRFIDKETGESIFVETEKAIFSEYANHITEEISKLKDTIFDTVNGKLVKKVNLDATHEVNTLNAAFFIQSLIGYNSSKESLSNLSVAMKVQVYAQLFSTGLNTITDAAKVVELVSTALDETIDLLPTLSEGLPVIATIIDGVSLGASIKELSETSDPLLRQEIEAKIGIMAVNLTAATTAIITSSLGIASGFSILLVPLAGISAGIPSLVNNELILRAEAKNVVDYFGHISLAESEGAFTLLDDKIMMPQDDLVISEIDFNNNSITLGKCEIWRMEGGSGHTVTDDIDHFFSAPSTTYREPYLSIYDVLDVKKEELDLSKDLMVLPNAPDRIFGWERGWTPGLRSLENDGTKLLDRIRDHYEGQFYWRFFAFIADSVITKLKPRYEDTNIRISLDSNTRSFIVPVITTEYIREKLSYSFYGSGGTYALSLSQYNMNINIELNENDTWVIDVDNVVRDVTIESDKIKKGDLIENILSKLSIEDNKIILDNHEINFSGTLNGGNGFVSLTFSILEGINAVIEVDLLSKSYKVLISGELKTLMANSNSVQQKIDYIGLNSELQKNIPYSFMDDEGKENGFINCFTKEGLFVSELSDVVLIIKVYMDNSKPPFGYYSNDLKDVKVITKDDVIILTGYYLKDDIKISLSFTIQDKNTIKLNGVYLDENGVAEILKFMNKKGSTNTSDSLMSFLESMNIKSIFIKSLKSNAKLILDTNFIISGTTSIGQFEFICDKDNNIQPYFIKFNTLETKYTLYVGNRQNMIVEPNYNLDDSGDISSTVINFSQKYLYGIDSCVNKVIISPNIYTDEINITPVHEANNTYPEVIVLDTNYISEKINININDLSIRYVWSNDGSDFILMSTDEENKVSQVKIRFTNVFKGNTISDKISFNFSDKQDVSINKIISTFTPSYYVEGLLNYHLGLISLYNEKFYINNFGMMVSGLVYINDSLYYFKPPIKNLITGFTTIGDDKYYFNPDNGGAASVGETIIDGKNYYFSQNGVLQTGVFSTEDGFKYFAPADTLDENLEGEAIDFTGKLTIDENVYYFGDNYRAAIEWQTLDDEVYYFSTDTGRAFKGLNQIGDDKFYFNSDGIMQKGFVNINDKTFYFDDSGVMKSGYTEIDGKYFYFAENGEMQIGVFNTADGFKYFAHHDEELGNEEGEALSYSGILNFNNKIYYFDDSFTAVVGWKDLEDGSKYYFDEDTAEAYIGISIINDSKYYFNDSGIMQIGFVTINNEVFYFSDSGIVESGMQNIDDNYFYIDENGLVQIGVFDTSDGYKYFAPANTVNDNIYGQAVEYSGLVRVNEDVYSFGESYTIETGWIYDSENESDKYYFDPETKKAYKGINVIDDIKYYFDENGIMRTGLITFENNHYYFNEDGEMQYGYLNIEDKMFYFSEDGIMQIGVFNTPDGFKYFAHQNTLDENFEGESINYTGWLDLDEKRYYFTDEYIAATGSVIIDGEEYYFDPDTAELVISE

SEQ ID NO: 836 - protein, 2366 aa, Clostridium difficile
MSLVNRKQLEKMANVRFRTQEDEYVAILDALEEYHNMSENTVVEKYLKLKDINSLTDIYIDTYKKSGRNKALKKFKEYLVTEVLELKNNNLTPVEKNLHFVWIGGQINDTAINYINQWKDVNSDYNVNVFYDSNAFLINTLKKTVVESAINDTLESFRENLNDPRFDYNKFFRKRMEIIYDKQKNFINYYKAQREENPELIIDDIVKTYLSNEYSKEIDELNTYIEESLNKITQNSGNDVRNFEEFKNGESFNLYEQELVERWNLAAASDILRISALKEIGGMYLDVDMLPGIQPDLFESIEKPSSVTVDFWEMTKLEAIMKYKEYIPEYTSEHFDMLDEEVQSSFESVLASKSDKSEIFSSLGDMEASPLEVKIAFNSKGIINQGLISVKDSYCSNLIVKQIENRYKILNNSLNPAISEDNDFNTTTNTFIDSIMAEANADNGRFMMELGKYLRVGFFPDVKTTINLSGPEAYAAAYQDLLMFKEGSMNIHLIEADLRNFEISKTNISQSTEQEMASLWSFDDARAKAQFEEYKRNYFEGSLGEDDNLDFSQNIVVDKEYLLEKISSLARSSERGYIHYIVQLQGDKISYEAACNLFAKTPYDSVLFQKNIEDSEIAYYYNPGDGEIQEIDKYKIPSIISDRPKIKLTFIGHGKDEFNTDIFAGFDVDSLSTEIEAAIDLAKEDISPKSIEINLLGCNMFSYSINVEETYPGKLLLKVKDKVSELMPSISQDSIIVSANQYEVRINSEGRRELLDHSGEWINKEESIIKDISSKEYISFNPKENKITVKSKNLPELSTLLQEIRNNSNSSDIELEEKVMLTECEINVISNIDTQIVEERIEEAKNLTSDSINYIKDEFKLIESISDALCDLKQQNELEDSHFISFEDISETDEGFSIRFINKETGESIFVETEKTIFSEYANHITEEISKIKGTIFDTVNGKLVKKVNLDTTHEVNTLNAAFFIQSLIEYNSSKESLSNLSVAMKVQVYAQLFSTGLNTITDAAKVVELVSTALDETIDLLPTLSEGLPIIATIIDGVSLGAAIKELSETSDPLLRQEIEAKIGIMAVNLTTATTAIITSSLGIASGFSILLVPLAGISAGIPSLVNNELVLRDKATKVVDYFKHVSLVETEGVFTLLDDKIMMPQDDLVISEIDFNNNSIVLGKCEIWRMEGGSGHTVTDDIDHFFSAPSITYREPHLSIYDVLEVQKEELDLSKDLMVLPNAPNRVFAWETGWTPGLRSLENDGTKLLDRIRDNYEGEFYWRYFAFIADALITTLKPRYEDTNIRINLDSNTRSFIVPIITTEYIREKLSYSFYGSGGTYALSLSQYNMGINIELSESDVWIIDVDNVVRDVTIESDKIKKGDLIEGILSTLSIEENKIILNSHEINFSGEVNGSNGFVSLTFSILEGINAIIEVDLLSKSYKLLISGELKILMLNSNHIQQKIDYIGFNSELQKNIPYSFVDSEGKENGFINGSTKEGLFVSELPDVVLISKVYMDDSKPSFGYYSNNLKDVKVITKDNVNILTGYYLKDDIKISLSLTLQDEKTIKLNSVHLDESGVAEILKFMNRKGSTNTSDSLMSFLESMNIKSIFVNFLQSNIKFILDANFIISGTTSIGQFEFICDENDNIQPYFIKFNTLETNYTLYVGNRQNMIVEPNYDLDDSGDISSTVINFSQKYLYGIDSCVNKVVISPNIYTDEINITPVYETNNTYPEVIVLDANYINEKINVNINDLSIRYVWSNDGNDFILMSTSEENKVSQVKIRFVNVFKDKTLANKLSFNFSDKQDVPVSEIILSFTPSYYEDGLIGYDLGLVSLYNEKFYINNFGMMVSGLIYINDSLYYFKPPVNNLITGFVTVGDDKYYFNPINGGAASIGETIIDDKNYYFNQSGVLQTGVFSTEDGFKYFAPANTLDENLEGEAIDFTGKLIIDENIYYFDDNYRGAVEWKELDGEMHYFSPETGKAFKGLNQIGDDKYYFNSDGVMQKGFVSINDNKHYFDDSGVMKVGYTEIDGKHFYFAENGEMQIGVFNTEDGFKYFAHHNEDLGNEEGEEISYSGILNFNNKIYYFDDSFTAVVGWKDLEDGSKYYFDEDTAEAYIGLSLINDGQYYFNDDGIMQVGFVTINDKVFYFSDSGIIESGVQNIDDNYFYIDDNGIVQIGVFDTSDGYKYFAPANTVNDNIYGQAVEYSGLVRVGEDVYYFGETYTIETGWIYDMENESDKYYFNPETKKACKGINLIDDIKYYFDEKGIMRTGLISFENNNYYFNENGEMQFGYINIEDKMFYFGEDGVMQIGVFNTPDGFKYFAHQNTLDENFEGESINYTGWLDLDEKRYYFTDEYIAATGSVIIDGEEYYFDPDTAQLVISE

SEQ ID NO: 837 - protein, 2366 aa, Clostridium difficile
MSLVNRKQLEKMANVRFRTQEDEYVAILDALEEYHNMSENTVVEKYLKLKDINSLTDIYIDTYKKSGRNKALKKFKEYLVTEVLELKNNNLTPVEKNLHFVWIGGQINDTAINYINQWKDVNSDYNVNVFYDSNAFLINTLKKTVVESAINDTLESFRENLNDPRFDYNKFFRKRMEIIYNKQKNFINYYKAQREENPELIIDDIVKTYLSNEYSKEIDELNTYIEESLNKITQNSGNDVRNFEEFKNGESFNLYEQELVERWNLAAASDILRISALKEIGGMYLDVDMLPGIQPDLFESIEKPSSVTVDFWEMTKLEAIMKYKEYIPEYTSEHFDMLDEEVQSSFESVLASKSDKSEIFSSLGDMEASPLEVKIAFNSKGIINQGLISVKDSYCSNLIVKQIENRYKILNNSLNPAISEDNDFNTTTNTFIDSIMAEANADNGRFMMELGKYLRVGFFPDVKTTINLSGPEAYAAAYQDLLMFKEGSMNIHLIEADLRNFEISKTNISQSTEQEMASLWSFDDARAKAQFEEYKRNYFEGSLGEDDNLDFSQNIVVDKEYLLEKISSLARSSERGYIHYIVQLQGDKISYEAACNLFAKTPYDSVLFQKNIEDSEIAYYYNPGDGEIQEIDKYKIPSIISDRPKIKLTFIGHGKDEFNTDIFAGFDVDSLSTEIEAAIDLAKEDISPKSIEINLLGCNMFSYSINVEETYPGKLLLKVKDKISELMPSISQDSIIVSANQYEVRINSEGRRELLDHSGEWINKEESIIKDISSKEYISFNPKENKITVKSKNLPELSTLLQEIRNNSNSSDIELEEKVMLTECEINVISNIDTQIVEERIEEAKNLTSDSINYIKDEFKLIESISDALCDLKQQNELEDSHFISFEDISETDEGFSIRFINKETGESIFVETEKTIFSEYANHITEEISKIKGTIFDTVNGKLVKKVNLDTTHEVNTLNAAFFIQSLIEYNSSKESLSNLSVAMKVQVYAQLFSTGLNTITDAAKVVELVSTALDETIDLLPTLSEGLPIIATIIDGVSLGAAIKELSETSDPLLRQEIEAKIGIMAVNLTTATTAIITSSLGIASGFSILLVPLAGISAGIPSLVNNELVLRDKATKVVDYFKHVSLVETEGVFTLLDDKVMMPQDDLVISEIDFNNNSIVLGKCEIWRMEGGSGHTVTDDIDHFFSAPSITYREPHLSIYDVLEVQKEELDLSKDLMVLPNAPNRVFAWETGWTPGLRSLENDGTKLLDRIRDNYEGEFYWRYFAFIADALITTLKPRYEDTNIRINLDSNTRSFIVPIITTEYIREKLSYSFYGSGGTYALSLSQYNMGINIELSESDVWIIDVDNVVRDVTIESDKIKKGDLIEGILSTLSIEENKIILNSHEINFSGEVNGNNGFVSLTFSILEGINAIIEVDLLSKSYKLLISGELKILMLNSNHIQQKIDYIGFNSELQKNIPYSFVDSEGKENGFINGSTKEGLFVSELPDVVLISKVYMDDSKPSFGYYSNNLKDVKVITKDNVNILTGCYLKDDIKISLSLTLQDEKTIKLNSVHLDESGVAEILKFMNRKGSTNTSDSLMSFLESMNIKSIFVNFLQSNIKFILDANFIISGTTSIGQFEFICDENDNIQPYFIKFNTLETNYTLYVGNRQNMIVEPNYDLDDSGDISSTVINFSQKYLYGIDSCVNKVVISPNIYTDEINITPVYETNNTYPEVIVLDANYINEKINVNINDLSIRYVWSNDGNDFILMSTSEENKVSQVKIRFVNVFKDKTLANKLSFNFSDKQDVPVSEIILSFTPSYYEDGLIGYDLGLVSLYNEKFYINNFGMMVSGLIYINDSLYYFKPPVNNLITGFVTVGDDKYYFNPINGGAASIGETIIDDKNYYFNQSGVLQTGVFSTEDGFKYFAPANTLDENLEGEAIDFTGKLIIDENIYYFEDNYRGAVEWKELDGEMHYFSPETGKAFKGLNQIGDDKYYFNSDGVMQKGFVSINDNKHYFDDSGVMKVGYTEIDGKHFYFAENGEMQIGVFNTEDGFKYFAHHNEDLGNEEGEEISYSGILNFNNKIYYFDDSFTAVVGWKDLEDGSKYYFDEDTAEAYIGLSLINDGQYYFNDDGIMQVGFVTINDKVFYFSDSGIIESGVQNIDDNYFYIDDNGIVQIGVFDTSDGYKYFAPANTVNDNIYGQAVEYSGLVRVGEDVYYFGETYTIETGWIYDMENESDKYYFNPETKKACKGINLIDDIKYYFDEKGIMRTGLISFENNNYYFNENGEMQFGYINIEDKMFYFGEDGVMQIGVFNTPDGFKYFAHQNTLDENFEGESINYTGWLDLDEKRYYFTDEYIAATGSVIIDGEEYYFDPDTAQLVISE

SEQ ID NO: 838 - protein, 2366 aa, Clostridium difficile
MSLVNRKQLEKMANVRFRTQEDEYVAILDALEEYHNMSENTVVEKYLKLKDINSLTDIYIDTYKKSGRNKALKKFKEYLVTEVLELKNNNLTPVEKNLHFVWIGGQINDTAINYINQWKDVNSDYNVNVFYDSNAFLINTLKKTVVESAINDTLESFRENLNDPRFDYNKFFRKRMEIIYDKQKNFINYYKAQREENPELIIDDIVKTYLSNEYSKEIDELNTYIEESLNKITQNSGNDVRNFEEFKNGESFNLYEQELVERWNLAAASDILRISALKEIGGMYLDVDMLPGIQPDLFESIEKPSSVTVDFWEMTKLEAIMKYKEYIPEYTSEHFDMLDEEVQSSFESVLASKSDKSEIFSSLGDMEASPLEVKIAFNSKGIINQGLISVKDSYCSNLIVKQIENRYKILNNSLNPAISEDNDFNTTTNTFIDSIMAEANADNGRFMMELGKYLRVGFFPDVKTTINLSGPEAYAAAYQDLLMFKEGSMNIHLIEADLRNFEISKTNISQSTEQEMASLWSFDDARAKAQFEEYKRNYFEGSLGEDDNLDFSQNIVVDKEYLLEKISSLARSSERGYIHYIVQLQGDKISYEAACNLFAKTPYDSVLFQKNIEDSEIAYYYNPGDGEIQEIDKYKIPSIISDRPKIKLTFIGHGKDEFNTDIFAGFDVDSLSTEIEAAIDLAKEDISPKSIEINLLGCNMFSYSINVEETYPGKLLLKVKDKISELMPSISQDSIIVSANQYEVRINSEGRRELLDHSGEWINKEESIIKDISSKEYISFNPKENKITVKSKNLPELSTLLQEIRNNSNSSDIELEEKVMLTECEINVISNIDTQIVEERIEEAKNLTSDSINYIKDEFKLIESISDALCDLKQQNELEDSHFISFEDISETDEGFSIRFINKETGESIFVETEKTIFSEYANHITEEISKIKGTIFDTVNGKLVKKVNLDTTHEVNTLNAAFFIQSLIEYNSSKESLSNLSVAMKVQVYAQLFSTGLNTITDAAKVVELVSTALDETIDLLPTLSEGLPIIATIIDGVSLGAAIKELSETSDPLLRQEIEAKIGIMAVNLTTATTAIITSSLGIASGFSILLVPLAGISAGIPSLVNNELVLRDKATKVVDYFKHVSLVETEGVFTLLDDKIMMPQDDLVISEIDFNNNSIVLGKCEIWRMEGGSGHTVTDDIDHFFSAPSITYREPHLSIYDVLEVQKEELDLSKDLMVLPNAPNRVFAWETGWTPGLRSLENDGTKLLDRIRDNYEGEFYWRYFAFIADALITTLKPRYEDTNIRINLDSNTRSFIVPIITTEYIREKLSYSFYGSGGTYALSLSQYNMGINIELSESDVWIIDVDNVVRDVTIESDKIKKGDLIEGILSTLSIEENKIILNSHEINFSGEVNGSNGFVSLTFSILEGINAIIEVDLLSKSYKLLISGELKILMLNSNHIQQKIDYIGFNSELQKNIPYSFVDSEGKENGFINGSTKEGLFVSELPDVVLISKVYMDDSKPSFGYYSNNLKDVKVITKDNVNILTGYYLKDDIKISLSLTLQDEKTIKLNSVHLDESGVAEILKFMNRKGSTNTSDSLMSFLESMNIKSIFVNFLQSNIKFILDANFIISGTTSIGQFEFICDENDNIQPYFIKFNTRETNYTLYVGNRQNMIVEPNYDLDDSGDISSTVINFSQKYLYGIDSCVNKVVISPNIYTDEINITPVYETNNTYPEVIVLDTNYINEKINVNINDLSIRYVWSNDGNDFILMSTSEENKVSQVKIRFVNVFKDKTLANKLSFNFSDKQDVPVSEIILSFTPSYYEDGLIGYDLGLVSLYNEKFYINNFGMMVSGLIYINDSLYYFKPPVNNLITGFVTVGDDKYYFNPINGGAASIGETIIDDKNYYFNQSGVLQTGVFSTEDGFKYFAPANTLDENLEGEAIDFTGKLIIDENIYYFDDNYRGAVEWKELDGEMHYFSPETGKAFKGLNQIGDYKYYFNSDGVMQKGFVSINDNKHYFDDSGVMKVGYTEIDGKHFYFAENGEMQIGVFNTEDGFKYFAHHNEDLGNEEGEEISYSGILNFNNKIYYFDDSFTAVVGWKDLEDGSKYYFDEDTAEAYIGLSLINDGQYYFNDDGIMQVGFVTINDKVFYFSDSGIIESGVQNIDDNYFYIDDNGIVQIGVFDTSDGYKYFAPANTVNDNIYGQAVEYSGLVRVGEDVYYFGETYTIETGWIYDMENESDKYYFNPETKKACKGINLIDDIKYYFDEKGIMRTGLISFENNNYYFNENGEMQFGYINIEDKMFYFGEDGVMQIGVFNTPDGFKYFAHQNTLDENFEGESINYTGWLDLDEKRYYFTDEYIAATGSVIIDGEEYYFDPDTAQLVISE

SEQ ID NO: 839 - protein, 2366 aa, Clostridium difficile
MSLVNRKQLEKMANVRFRTQEDEYVAILDALEEYHNMSENTVVEKYLKLKDINSLTDIYIDTYKKSGRNKALKKFKEYLVTEVLELKNNNLTPVEKNLHFVWIGGQINDTAINYINQWKDVNSDYNVNVFYDSNAFLINTLKKTVVESAINDTLESFRENLNDPRFDYNKFFRKRMEIIYDKQKNFINYYKAQREENPELIIDDIVKTYLSNEYSKEIDELNTYIEESLNKITQNSGNDVRNFEEFKNGESFNLYEQELVERWNLAAASDILRISALKEIGGMYLDVDMLPGIQPDLFESIEKPSSVTVDFWEMTKLEAIMKYKEYIPEYTSEHFDMLDEEVQSSFESVLASKSDKSEIFSSLGDMEASPLEVKIAFNSKGIINQGLISVKDSYCSNLIVKQIENRYKILNNSLNPAISEDNDFNTTTNTFIDSIMAEANADNGRFMMELGKYLRVGFFPDVKTTINLSGPEAYAAAYQDLLMFKEGSMNIHLIEADLRNFEISKTNISQSTEQEMASLWSFDDARAKAQFEEYKRNYFEGSLGEDDNLDFSQNIVVDKEYLLEKISSLARSSERGYIHYIVQLQGDKISYEAACNLFAKTPYDSVLFQKNIEDSEIAYYYNPGDGEIQEIDKYKIPSIISDRPKIKLTFIGHGKDEFNTDIFAGFDVDSLSTEIEAAIDLAKEDISPKSIEINLLGCNMFSYSINVEETYPGKLLLKVKDKISELMPSISQDSIIVSANQYEVRINSEGRRELLDHSGEWINKEESIIKDISSKEYISFNPKENKITVKSKNLPELSTLLQEIRNNSNSSDIELEEKVMLTECEINVISNIDTQIVEERIEEAKNLTSDSINYIKDEFKLIESISDALCDLKQQNELEDSHFISFEDISETDEGFSIRFINKETGESIFVETEKTIFSEYANHITEEISKIKGTIFDTVNGKLVKKVNLDTTHEVNTLNAAFFIQSLIEYNSSKESLSNLSVAMKVQVYAQLFSTGLNTITDAAKVVELVSTALDETIDLLPTLSEGLPIIATIIDGVSLGAAIKELSETSDPLLRQEIEAKIGIMAVNLTTATTAIITSSLGIASGFSILLVPLAGISAGIPSLVNNELVLRDKATKVVDYFKHVSLVETEGVFTLLDDKIMMPQDDLVISEIDFNNNSIVLGKCEIWRMEGGSGHTVTDDIDHFFSAPSITYREPHLSIYDVLEVQKEELDLSKDLMVLPNAPNRVFAWETGWTPGLRSLENDGTKLLDRIRDNYEGEFYWRYFAFIADALITTLKPRYEDTNIRINLDSNTRSFIVPIITTEYIREKLSYSFYGSGGTYALSLSQYNMGINIELSESDVWIIDVDNVVRDVTIESDKIKKGDLIEGILSTLSIEENKIILNSHEINFSGEVNGSNGFVSLTFSILEGINAIIEVDLLSKSYKLLISGELKILMLNSNHIQQKIDYIGFNSELQKNIPYSFVDSEGKENGFINGSTKEGLFVSELPDVVLISKVYMDDSKPSFGYYSNNLKDVKVITKDNVNILTGYYLKDDIKISLSLTLQDEKTIKLNSVHLDESGVAEILKFMNRKGNTNTSDSLMSFLESMNIKSIFVNFLQSNIKFILDANFIISGTTSIGQFEFICDENDNIQPYFIKFNTLETNYTLYVGNRQNMIVEPNYDLDDSGDISSTVINFSQKYLYGIDSCVNKVVISPNIYTDEINITPVYETNNTYPEVIVLDANYINEKINVNINDLSIRYVWSNDGNDFILMSTSEENKVSQVKIRFVNVFKDKTLANKLSFNFSDKQDVPVSEIILSFTPSYYEDGLIGYDLGLVSLYNEKFYINNFGMMLSGLIYINDSLYYFKPPVNNLITGFVTVGDDKYYFNPINGGAASIGETIIDDKNYYFNQSGVLQTGVFSTEDGFKYFAPANTLDENLEGEAIDFTGKLIIDENIYYFDDNYRGAVEWKELDGEMHYFSPETGKAFKGLNQIGDDKYYFNSDGVMQKGFVSINDNKHYFDDSGVMKVGYTEIDGKHFYFAENGEMQIGVFNTEDGFKYFAHHNEDLGNEEGEEISYSGILNFNNKIYYFDDSFTAVVGWKDLEDGSKYYFDEDTAEAYIGLSLINDGQYYFNDDGIMQVGFVTINDKVFYFSDSGIIESGVQNIDDNYLYIDDNGIVQIGVFDTSDGYKYFAPANTVNDNIYGQAVEYSGLVRVGEDVYYFGETYTIETGWIYDMENESDKYYFNPETKKACKGINLIDDIKYYFDEKGIMRTGLISFENNNYYFNENGEMQFGYINIEDKMFYFGEDGVMQIGVFNTPDGFKYFAHQNTLDENFEGESINYTGWLDLDEKRYYFTDEYIAATGSVIIDGEEYYFDPDTAQLVISE

SEQ ID NO: 840 - protein, 2366 aa, Clostridium difficile
MSLVNRKQLEKMANVRFRTQEDEYVAILDALEEYHNMSENTVVEKYLKLKDINSLTDIYIDTYKKSGRNKALKKFKEYLVTEVLELKNNNLTPVEKNLHFVWIGGQINDTAINYINQWKDVNSDYNVNVFYDSNAFLINTLKKTIVESATNDTLESFRENLNDPRFDYNKFYRKRMEIIYDKQKNFINYYKTQREENPDLIIDDIVKIYLSNEYSKDIDELNSYIEESLNKVTENSGNDVRNFEEFKGGESFKLYEQELVERWNLAAASDILRISALKEVGGVYLDVDMLPGIQPDLFESIEKPSSVTVDFWEMVKLEAIMKYKEYIPGYTSEHFDMLDEEVQSSFESVLASKSDKSEIFSSLGDMEASPLEVKIAFNSKGIINQGLISVKDSYCSNLIVKQIENRYKILNNSLNPAISEDNDFNTTTNAFIDSIMAEANADNGRFMMELGKYLRVGFFPDVKTTINLSGPEAYAAAYQDLLMFKEGSMNIHLIEADLRNFEISKTNISQSTEQEMASLWSFDDARAKAQFEEYKKNYFEGSLGEDDNLDFSQNTVVDKEYLLEKISSLARSSERGYIHYIVQLQGDKISYEAACNLFAKTPYDSVLFQKNIEDSEIAYYYNPGDGEIQEIDKYKIPSIISDRPKIKLTFIGHGKDEFNTDIFAGLDVDSLSTEIETAIDLAKEDISPKSIEINLLGCNMFSYSVNVEETYPGKLLLRVKDKISELMPSISQDSIIVSANQYEVRINSEGRRELLDHSGEWINKEESIIKDISSKEYISFNPKENKIIVKSKNLPELSTLLQEIRNNSNSSDIELEEKVMLAECEINVISNIDTQVVEERIEEAKSLTSDSINYIKNEFKLIESISDALYDLKQQNELEESHFISFEDISETDEGFSIRFIDKETGESIFVETEKAIFSEYANHITEEISKLKDTIFDTVNGKLVKKVNLDATHEVNTLNAAFFIQSLIEYNSSKESLSNLSVAMKVQVYAQLFSTGLNTITDAAKVVELVSTALDETIDLLPTLSEGLPVIATIIDGVSLGAAIKELSETSDPLLRQEIEAKIGIMAVNLTAATTAIITSSLGIASGFSILLVPLAGISAGIPSLVNNELILRDKATKVVDYFSHISLAESEGAFTSLDDKIMMPQDDLVISEIDFNNNSITLGKCEIWRMEGGSGHTVTNDIDHFFSSPSITYREPHLSIYDVLEVKKEELDLSKDLMVLPNAPNRVFGWETGWTPGLRSLENDGTKLLDRIRDQYEGQFYWRFLAFIADALITTLKPRYEDTNVRISLDSNTRSFIVPVITTEYIREKLSYSFYGSGGTYALSLSQYNMNINIELNENDTWVIDVDNVVRDVTIESDKIKKGDLIENILSKLSIEDNKIILDNHEINFSGTLNGGNGFVSLTFSILEGINAVIEVDLLSKSYKVLISGELKTLMANSNSVQQKIDYIGLNSELQKNIPYSFMDDKGKENGFINCSTKEGLFVSELSDVVLISKVYMDNSKPLFGYCSNDLKDVKVITKDDVIILTGYYLKDDIKISLSFTIQDENTIKLNGVYLDENGVAEILKFMNKKGSTNTSDSLMSFLESMNIKSIFINSLQSNTKLILDTNFIISGATSIGQFEFICDKDNNIQPYFIKFNTLETKYTLYVGNRQNMIVEPNYDLDDSGDISSTVINFSQKYLYGIDSCVNKVIISPNIYTDEINITPIYEANNTYPEVIVLDTNYISEKINININDLSIRYVWSNDGSDFILMSTDEENKVSQVKIRFTNVFKGNTISDKISFNFSDKQDVSINKIISTFTPSYYVEGLLNYHLGLISLYNEKFYINNFGMMVSGLVYINDSLYYFKPPIKNLITGFTTIGDDKYYFNPDNGGAASVGETIIDGKNYYFSQNGVLQTGVFSTEDGFKYFAPADTLDENLEGEAIDFTGKLTIDENVYYFGDNYRAAIEWQTLDDEVYYFSTDTGRAFKGLNQIGDDKFYFNSDGIMQKGFVNINDKTFYFDDSGVMKSGYTEIDGKYFYFAENGEMQIGVFNTADGFKYFAHHDEDLGNEEGEALSYSGILNFNNKIYYFDDSFTAVVGWKDLEDGSKYYFDEDTAEAYIGISIINDGKYYFNDSGIMQIGFVTINNEVFYFSDSGIVESGMQNIDDNYFYIDENGLVQIGVFDTSDGYKYFAPANTVNDNIYGQAVEYSGLVRVGEDVYYFGETYTIETGWIYDMENESDKYYFDPETKKAYKGINVIDDIKYYFDENGIMRTGLITFEDNHYYFNEDGIMQYGYLNIEDKTFYFSEDGIMQIGVFNTPDGFKYFAHQNTLDENFEGESINYTGWLDLDEKRYYFTDEYIAATGSVIIDGEEYYFDPDTAQLVISE

SEQ ID NO: 841 - DNA, 22 bp, synthetic construct
  source 1..22: mol_type = other DNA
  misc_feature 1..22: note = Synthetic nucleic acid sequence
tgactgtgaacgttcgagatga

SEQ ID NO: 842 - DNA, 24 bp, synthetic construct
  source 1..24: mol_type = other DNA
  misc_feature 1..24: note = Synthetic nucleic acid sequence
tcgtcgttttgtcgttttgtcgtt

SEQ ID NO: 843 - DNA, 21 bp, synthetic construct
  source 1..21: mol_type = other DNA
  misc_feature 1..21: note = Synthetic nucleic acid sequence
tcgtcgtttttcggtcgtttt

SEQ ID NO: 844 - DNA, 20 bp, synthetic construct
  source 1..20: mol_type = other DNA
  misc_feature 1..20: note = Synthetic nucleic acid sequence
tccatgacgttcctgacgtt

SEQ ID NO: 845 - DNA, 24 bp, synthetic construct
  source 1..24: mol_type = other DNA
  misc_feature 1..24: note = Synthetic nucleic acid sequence
tcgtcgtttcgtcgttttgtcgtt

SEQ ID NO: 846 - DNA, 24 bp, synthetic construct
  source 1..24: mol_type = other DNA
  misc_feature 1..24: note = Synthetic nucleic acid sequence
tcgtcgttttgtcgtttttttcga

SEQ ID NO: 847 - DNA, 21 bp, synthetic construct
  source 1..21: mol_type = other DNA
  misc_feature 1..21: note = Synthetic nucleic acid sequence
ggggacgacgtcgtggggggg

SEQ ID NO: 848 - DNA, 22 bp, synthetic construct
  source 1..22: mol_type = other DNA
  misc_feature 1..22: note = Synthetic nucleic acid sequence
tcgcgtcgttcggcgcgcgccg

SEQ ID NO: 849 - DNA, 23 bp, synthetic construct
  source 1..23: mol_type = other DNA
  misc_feature 1..23: note = Synthetic nucleic acid sequence
tcgtcgacgttcggcgcgcgccg

SEQ ID NO: 850 - DNA, 21 bp, synthetic construct
  source 1..21: mol_type = other DNA
  misc_feature 1..21: note = Synthetic nucleic acid sequence
tcggacgttcggcgcgcgccg

SEQ ID NO: 851 - DNA, 19 bp, synthetic construct
  source 1..19: mol_type = other DNA
  misc_feature 1..19: note = Synthetic nucleic acid sequence
tcggacgttcggcgcgccg

SEQ ID NO: 852 - DNA, 20 bp, synthetic construct
  source 1..20: mol_type = other DNA
  misc_feature 1..20: note = Synthetic nucleic acid sequence
tcgcgtcgttcggcgcgccg

SEQ ID NO: 853 - DNA, 20 bp, synthetic construct
  source 1..20: mol_type = other DNA
  misc_feature 1..20: note = Synthetic nucleic acid sequence
tcgacgttcggcgcgcgccg

SEQ ID NO: 854 - DNA, 18 bp, synthetic construct
  source 1..18: mol_type = other DNA
  misc_feature 1..18: note = Synthetic nucleic acid sequence
tcgacgttcggcgcgccg

SEQ ID NO: 855 - DNA, 18 bp, synthetic construct
  source 1..18: mol_type = other DNA
  misc_feature 1..18: note = Synthetic nucleic acid sequence
tcgcgtcgttcggcgccg

SEQ ID NO: 856 - DNA, 22 bp, synthetic construct
  source 1..22: mol_type = other DNA
  misc_feature 1..22: note = Synthetic nucleic acid sequence
tcgcgacgttcggcgcgcgccg

SEQ ID NO: 857 - DNA, 22 bp, synthetic construct
  source 1..22: mol_type = other DNA
  misc_feature 1..22: note = Synthetic nucleic acid sequence
tcgtcgttttcggcgcgcgccg

SEQ ID NO: 858 - DNA, 22 bp, synthetic construct
  source 1..22: mol_type = other DNA
  misc_feature 1..22: note = Synthetic nucleic acid sequence
tcgtcgttttcggcggccgccg

SEQ ID NO: 859 - DNA, 24 bp, synthetic construct
  source 1..24: mol_type = other DNA
  misc_feature 1..24: note = Synthetic nucleic acid sequence
tcgtcgttttacggcgccgtgccg

SEQ ID NO: 860 - DNA, 23 bp, synthetic construct
  source 1..23: mol_type = other DNA
  misc_feature 1..23: note = Synthetic nucleic acid sequence
tcgtcgttttcggcgcgcgccgt

SEQ ID NO: 861 - DNA, 23 bp, synthetic construct
  source 1..23: mol_type = other DNA
  misc_feature 1..23: note = Synthetic nucleic acid sequence
tcgtcgacgatcggcgcgcgccg
